United States Patent Application Publication US 2021/0260178 A1 - sequence listing, part 26

SEQ ID NO: 42824 - RNA, 1671 nt, Artificial Sequence
  mRNA product Design b-4 (A100) comprising derived and/or modified sequence from LASV(GA391;Clade III)__CAA36645__GPCmut13 (opt1)
aggagagucccgcagucggcguccagcggcucugcuuguucgugugugugucguugcaggccuuauucaagcuuaccaugggccagaucgugaccuucuuccaggaggucccccacgugaucgaggaggugaugaacaucguccugaucgcccucagcauccuggccauccugaaggggcucuacaacguggcgaccugcggccugaucgggcuggugacguuccuccugcuguccggccgcagcugcucccucaucuacaaggggaccuacgagcugcagacccuggagcucaacauggagacccugaacaugacgaugccgcugagcugcaccaagaacaacucccaccacuacauccgggucggcaacgagaccggccucgagcugacccugacgaacaccagcauccucaaccacaaguucugcaaccuguccgacgcccacaagcgcaaccuguacgaccacagccucauguccaucaucagcaccuuccaccuguccauccccaacuucaaccaguacgaggccaugagcugcgacuucaacgggggcaagaucaccgugcaguacaaccugucccacagcuucgccguggacgccgcggggcacugcggcacgcucgccaacgggguccugcagaccuucaugcggauggccuggggcggcuccuacaucgcccuggacagcgggcgcggcaacugggacugcaucaugaccuccuaccaguaccucaucauccagaacaccacgugggacgaccacugccaguucagccggcccucccccaucggguaccugggccugcucagccagcgcacccgggacaucuacaucagccgccggcugcugggcaccuucaccuggacgcucuccgacagcgaggggaacgagaccccgggcggguacugccugacccgcuggaugcugaucgaggcggagcucaagugcuucggcaacaccgccguggccaagugcaacgagaagcacgacgaggaguucugcgacaugcugcggcuguucgacuucaacaagcaggccauccgccggcucaagacggaggcccagauguccauccagcugaucaacaaggcggugaacgcccugaucaacgaccagcucaucaugaagaaccaccuccgcgacaucauggggauccccuacugcaacuacagccgguacugguaccugaaccacaccuccaccggcaagaccagccugccccgcugcuggcugaucuccaacggcagcuaccugaacgagacgaaguucuccgacgacaucgagcagcaggccgacaacaugaucaccgagaugcugcagaaggaguacaucgaccggcaggggaagacgccccucggccuggucgaccuguucguguucagcaccuccuucuaccucaucagcaucuuccugcaccuggugaagaucccgugaggacuaguaauaaggaaacuguaugaaugucugugggcaggaagugaagagauccuucuguaaagguuuuuggaauuaugucugcugaauaauaaacuuuuuugaaauaauaaaucugguagaaaaaugagaucuaaaaaaaaaaaaaaaaaaaaaaaaaaaaaaaaaaaaaaaaaaaaaaaaaaaaaaaaaaaaaaaaaaaaaaaaaaaaaaaaaaaaaaaaaaaaaaaaaaaa

SEQ ID NO: 42825 - RNA, 1674 nt, Artificial Sequence
  mRNA product Design b-4 (A100) comprising derived and/or modified sequence from LASV(AV;Clade V)__CCA30314__GPCmut13 (opt1)
aggagagucccgcagucggcguccagcggcucugcuuguucgugugugugucguugcaggccuuauucaagcuuaccaugggccagaucgugaccuucuuccaggaggucccccacgugaucgaggaggugaugaacaucguccugaucgcccucagcauccuggccgugcugaaggggcucuacaacaucgcgaccugcggccugaucgggcugaucacguuccuccugcugugcggccgcuccugcagcuccaaccucuacaaggggguguacgagcugcagagccuggaccucaacauggagacccugaacaugaccaugccgcuguccugcaccaagaacaacagccaccacuacauccgggucggcaacgacacgggccucgagcugacccugaccaacaccuccauccucaaccacaaguucugcaaccugagcgacgcccacaagaaggaccuguacgaccacgcccucauguccaucaucagcacguuccaccuguccauccccaacuucaaccaguacgaggccaugagcugcgacuucaacgggggcaagaucuccgugcaguacaaccugagccacuccuacgccaucgacgcggccaaccacugcgggaccguggccaacggcauccuccagaccuucaugcgcauggccuggggcgggagcuacaucgcgcuggacuccggccgggggaacugggacugcaucaugaccagcuaccaguaccugaucauccagaacacgaccugggagaaccacugccaguucucccgccccagccccaucggcuaccucgggcugcugagccagcggacccgcgacaucuacaucucccggcgccuccugggcaccuucacguggacccugagcgacuccgagggcaacgccacccccgggggcuacugccucacccgguggaugcugaucgaggccgagcugaagugcuucgggaacacggccgucgccaagugcaacgagaagcacgacgaggaguucugcgacaugcuccgccuguucgacuucaacaagcaggcgaucagccggcugaaguccgaggcccagaugagcauccagcucaucaacaaggccgugaacgcccugaucaacgaccagcugaucaugaagaaccaccuccgcgacaucaugggcauccccuacugcaacuacuccaaguacugguaccugaaccacaccaucaccgggaagaccagccugcccaagugcuggcucguguccaacggcagcuaccugaacgagacgcacuucuccgacgacaucgagcagcaggccgacaacaugaucaccgagaugcugcagaaggaguacauggagcggcagggcaagaccccgcuggggcucgucgaccuguucguguucagcaccuccuucuaccugaucagcaucuuccuccgccuggugaagaucccgugaggacuaguaauaaggaaacuguaugaaugucugugggcaggaagugaagagauccuucuguaaagguuuuuggaauuaugucugcugaauaauaaacuuuuuugaaauaauaaaucugguagaaaaaugagaucuaaaaaaaaaaaaaaaaaaaaaaaaaaaaaaaaaaaaaaaaaaaaaaaaaaaaaaaaaaaaaaaaaaaaaaaaaaaaaaaaaaaaaaaaaaaaaaaaaaaa

SEQ ID NO: 42826 - RNA, 1671 nt, Artificial Sequence
  mRNA product Design b-4 (A100) comprising derived and/or modified sequence from LASV(Togo/2016/7082;Clade VI)__AMR44577__GPCmut13 (opt1)
aggagagucccgcagucggcguccagcggcucugcuuguucgugugugugucguugcaggccuuauucaagcuuaccaugggccagaucaucaccuucuuccaggaggugccccacgucaucgaggaggugaugaacaucgugcugaucgcccucagccugcuggccauccucaagggggucuacaacguggcgaccugcggcaucaucgggcuggugacguuccuguuccucugcggccgcuccugcagccugaucuacaagggguccuacgagcugcagacccucgagcugaacauggagacccugaacaugaccaugccgcucagcugcacgaagaacuccagccaccacuacauccgggucggcaacgagaccggccuggagcugacccucaccaacacguccaucaucaaccacaaguucugcaaccugagcgacgcccacaagcgcaaccuguacgaccacgcccucauguccauccugagcaccuuccaccuguccauccccaacuucaaccaguacgaggccaugagcugcgacuucaacgggggcaagaucuccgugcaguacaaccucagccacgccuacgcgguggacgccgccgagcacugcgggaccgucgccaacggcgugcugcagaccuucaugcggauggcguggggcggguccuacaucgcccuggacagcggccgcgggaacugggacugcaucaugacguccuaccaguaccucaucauccagaacaccaccugggaggaccacugccaguucagccggcccucccccaucggcuaccuggggcugcucagccagcgcacccgggacaucuacaucagccgccggcugcugggcacguucaccuggacccucuccgacagcgagggcaacgagacccccgggggcuacugccugacgcgcuggaugcugaucgaggccgagcucaagugcuucgggaacaccgccguggccaagugcaacgagaagcacgacgaggaguucugcgacaugcugcggcuguucgacuucaacaagcaggcgauccagcgccucaaguccgaggcccagaugagcauccagcugaucaacaaggccgucaacgcccugaucaacgaccagcucaucaugaagaaccaccuccgggacaugaugggcauccccuacugcaacuacuccaaguacugguaccugaaccacaccagcuccgggcgcaccagccugcccaagugcuggcugguguccaacggcagcuaccugaacgagacgcacuucuccgacgacaucgagcagcaggccgacaacaugaucaccgagaugcuccagaaggaguacaucgaccggcagggcaagaccccgcuggggcugguggaccuguucgucuucagcaccuccuucuaccucaucagcaucuuccugcaccugaucaagaucccgugaggacuaguaauaaggaaacuguaugaaugucugugggcaggaagugaagagauccuucuguaaagguuuuuggaauuaugucugcugaauaauaaacuuuuuugaaauaauaaaucugguagaaaaaugagaucuaaaaaaaaaaaaaaaaaaaaaaaaaaaaaaaaaaaaaaaaaaaaaaaaaaaaaaaaaaaaaaaaaaaaaaaaaaaaaaaaaaaaaaaaaaaaaaaaaaaa

SEQ ID NO: 42827 - RNA, 1671 nt, Artificial Sequence
  mRNA product Design b-4 (A100) comprising derived and/or modified sequence from LASV(KAK-428;Clade n.d. (VII))__ANH09740__GPCmut13 (opt1)
aggagagucccgcagucggcguccagcggcucugcuuguucgugugugugucguugcaggccuuauucaagcuuaccaugggccagaucgugaccuucuuccaggaggucccccacgugaucgaggaggugaugaacaucguccugaucgcccucagccugcuggccauccucaaggggcuguacaacuucgcgaccugcggcgugaucgggcugaucacguuccuccugcugugcggccgcuccugcagcgccaccuacaaggggcaguacgagcuccagacccuggagcugaacauggagucccucaacaugaccaugccgcugagcugcacgaagaacaacucccaccacuacauccgggccggcaacaacaccggccuggagcucacccugaccaacacgagcaucaucucccacaaguucugcaaccugagcgacgcccacaagaagaaccucuacgaccacacccugauguccaucaucaccaccuuccaccugagcauccccaacuucaaccaguacgaggccauguccugcgacuucaacgggggcaagaucagcauccaguacaaccucucccacagcuacgcgggggacgccgcccagcacugcggcacgguggccaacgggguccugcagaccuucaugcgcauggcguggggcggcuccuaccuggcccucgacagcgggcggcgcggcugggacugcaucaucuccagcuaccaguaccugaucauccagaacaccaccugggacgaccacugccaguucucccggcccagccccaucggguaccugggcuucgugagccagaagacgcgcgacaucuacaucucccggcgccuccugggcaccuucaccuggacccugagcgacuccgaggggcacgacaugccgggcggguacugccucacgcgguggaugcugaucgaggccgaccugaagugcuucggcaacaccgccguggccaagugcaacgagaagcacgacgaggaguucugcgacauguggcgccucuucgacuucaacaagcaggcgauccagcggcugaaggccgaggcccagaugaacauccagcugaucaacaaggccgucaacgcccucaucaacgaccagcugaugaugaagaaccaccuccgcgacaucauggggauccccuacugcaacuacagcaaguucugguaccugaacaacaccaccacgggccggaccucccugccccgcugcuggcugaucagcaacggcuccuaccucaacgagacccacuucagcgacgacaucgagcagcaggcggacaacaugaucaccgagaugcugcagaaggaguacauggaccggcaggggaagacgccccugggccucguggaccuguucguguucuccaccagcuucuaccugaucaccaucuuccugcaccucgucaagaucccgugaggacuaguaauaaggaaacuguaugaaugucugugggcaggaagugaagagauccuucuguaaagguuuuuggaauuaugucugcugaauaauaaacuuuuuugaaauaauaaaucugguagaaaaaugagaucuaaaaaaaaaaaaaaaaaaaaaaaaaaaaaaaaaaaaaaaaaaaaaaaaaaaaaaaaaaaaaaaaaaaaaaaaaaaaaaaaaaaaaaaaaaaaaaaaaaaa

SEQ ID NO: 42828 - RNA, 1671 nt, Artificial Sequence; identical to SEQ ID NO: 42822
  mRNA product Design b-4 (A100) comprising derived and/or modified sequence from LASV(Pinneo-NIG-1969;Clade I)__AIT17836__GPCmut13 (opt1)

SEQ ID NO: 42829 - RNA, 1671 nt, Artificial Sequence
  mRNA product Design b-4 (A100) comprising derived and/or modified sequence from LASV(ISTH0009-NIG-2011;Clade II)__AIT17404__GPCmut13 (opt1)
aggagagucccgcagucggcguccagcggcucugcuuguucgugugugugucguugcaggccuuauucaagcuuaccaugggccagaucaucaccuucuuccaggaggugccccacgucaucgaggaggugaugaacaucgugcugaucgcccucagccugcuggccauccucaaggggaucuacaacgucgcgaccugcggccuguucgggcugguguccuuccuccugcugugcggccgcagcugcuccacgaccuacaaggggguguacgagcuccagacccuggagcuggacauggccagccucaacaugaccaugccgcuguccugcacgaagaacaacagccaccacuacaucauggucggcaacgagaccggccuggagcucacccugaccaacacguccaucaucaaccacaaguucugcaaccugagcgacgcccacaagaagaaccucuacgaccacgcccugauguccaucaucagcaccuuccaccuguccauccccaacuucaaccaguacgaggccaugagcugcgacuucaacgggggcaagaucuccgugcaguacaaccucagccacgcguacgccguggacgccgccaaccacugcgggaccaucgcgaacggcguccugcagaccuucaugcggauggccuggggcggguccuacaucgcccuggacagcggcaagggguccugggacugcaucaugacgagcuaccaguaccucaucauccagaacaccaccugggaggaccacugccaguucucccgccccagccccaucggcuaccuggggcugcucagccagcggacccgcgacaucuacaucucccggcgccugcugggcacguucaccuggacccucagcgacuccgagggcaacgagacccccgggggcuacugccugacgcgguggaugcugaucgaggccgagcucaagugcuucgggaacaccgccguggcgaagugcaacgagaagcacgacgaggaguucugcgacaugcugcgccuguucgacuucaacaagcaggccauccggcgccucaagaccgaggcccagaugagcauccagcugaucaacaaggccgugaacgcccugaucaacgaccagcucaucaugaagaaccaccuccgggacaucaugggcaucccguacugcaacuacuccaaguacugguaccugaaccacaccgucacggggaagaccagccugccccgcugcuggcugguguccaacggcagcuaccugaacgagacccacuucuccgacgacaucgagcagcaggcggacaacaugaucaccgagcuccugcagaaggaguacauggaccggcagggcaagacgccccuggggcugguggaccucuucgucuucagcaccuccuucuaccugaucagcaucuuccugcaccucaucaagaucccgugaggacuaguaauaaggaaacuguaugaaugucugugggcaggaagugaagagauccuucuguaaagguuuuuggaauuaugucugcugaauaauaaacuuuuuugaaauaauaaaucugguagaaaaaugagaucuaaaaaaaaaaaaaaaaaaaaaaaaaaaaaaaaaaaaaaaaaaaaaaaaaaaaaaaaaaaaaaaaaaaaaaaaaaaaaaaaaaaaaaaaaaaaaaaaaaaa

SEQ ID NO: 42830 - RNA, 1671 nt, Artificial Sequence
  mRNA product Design b-4 (A100) comprising derived and/or modified sequence from LASV(ISTH2010-NIG-2012;Clade II)__AIT17482__GPCmut13 (opt1)
aggagagucccgcagucggcguccagcggcucugcuuguucgugugugugucguugcaggccuuauucaagcuuaccaugggccagaucaucaccuucuuccaggaggugccccacgucaucgaggaggugaugaacaucgugcugaucgcccucagccugcuggccauccucaaggggaucuacaacgucgcgaccugcggccuguucgggcugguguccuuccuccugcugugcggccgcagcugcuccacgaccuacaaggggguguacgagcuccagacccuggagcuggacauggccagccucaacaugaccaugccgcuguccugcacgaagaacaacagccaccacuacaucauggucggcaacgagaccggccuggagcucacccugaccaacacguccaucaucaaccacaaguucugcaaccugagcgacgcccacaagaagaaccucuacgaccacgcccugauguccaucaucagcaccuuccaccuguccauccccaacuucaaccaguacgaggccaugagcugcgacuucaacgggggcaagaucuccgugcaguacaaccucagccacgcguacgccguggacgccgccaaccacugcgggaccaucgcgaacggcguccugcagaccuucaugcggauggccuggggcggguccuacaucgcccuggacagcggcaagggguccugggacugcaucaugacgagcuaccaguaccucaucauccagaacaucaccugggaggaccacugccaguucucccgccccagccccaucggcuaccuggggcugcucagccagcggacccgcgacaucuacaucucccggcgccugcugggcaccuucacguggacccucagcgacuccgagggcaacgagacccccgggggcuacugccugacccgguggaugcugaucgaggccgagcucaagugcuucgggaacacggccguggcgaagugcaacgagaagcacgacgaggaguucugcgacaugcugcgccuguucgacuucaacaagcaggccauccggcgccucaagaccgaggcccagaugagcauccagcugaucaacaaggccgugaacgcccugaucaacgaccagcucaucaugaagaaccaccuccgggacaucaugggcauccccuacugcaacuacuccaaguacugguaccugaaccacaccgucaccgggaagacgagccugccccgcugcuggcugguguccaacggcagcuaccugaacgagacccacuucuccgacgacaucgagcagcaggcggacaacaugaucaccgagcuccugcagaaggaguacaucgaccggcagggcaagaccccgcuggggcugguggaccucuucgucuucagcacguccuucuaccugaucagcaucuuccugcaccucgugaagaucccgugaggacuaguaauaaggaaacuguaugaaugucugugggcaggaagugaagagauccuucuguaaagguuuuuggaauuaugucugcugaauaauaaacuuuuuugaaauaauaaaucugguagaaaaaugagaucuaaaaaaaaaaaaaaaaaaaaaaaaaaaaaaaaaaaaaaaaaaaaaaaaaaaaaaaaaaaaaaaaaaaaaaaaaaaaaaaaaaaaaaaaaaaaaaaaaaaa

SEQ ID NO: 42831 - RNA, 1671 nt, Artificial Sequence
  mRNA product Design b-4 (A100) comprising derived and/or modified sequence from LASV(Lassa virus/H.sapiens-wt/NGA/2015/ISTH_0543;Clade II)__AVO03639__GPCmut13 (opt1)
aggagagucccgcagucggcguccagcggcucugcuuguucgugugugugucguugcaggccuuauucaagcuuaccaugggccagaucaucaccuucuuccaggaggugccccacgucaucgaggaggugaugaacaucgugcugaucgcccucagccugcuggccauccucaaggggaucuacaacgucgcgaccugcggccuguucgggcugguguccuuccuccugcugugcggccgcagcugcuccacgaccuacaaggggguguacgagcuccagacccuggagcuggacauggccaaccucaacaugaccaugccgcugagcugcacgaagaacaacucccaccacuacaucauggucggcaacgagaccggccuggagcucacccugaccaacacgagcaucaucaaccacaaguucugcaaccuguccgacgcccacaagaagaaccucuacgaccacgcccugaugagcaucaucuccaccuuccaccugagcauccccaacuucaaccaguacgaggccauguccugcgacuucaacgggggcaagaucagcgugcaguacaaccucucccacaccuacgcgguggacgccgccaaccacugcgggaccaucgccaacggcguccugcagacguucaugcggauggcguggggcgggagcuacaucgcccuggacuccggcaaggggagcugggacugcaucaugaccuccuaccaguaccucgugauccagaacaccaccugggaggaccacugccaguucagccgccccucccccaucggcuaccuggggcugcucagccagcggacgcgcgacaucuacaucagccggcgccugcugggcaccuucaccuggacccucuccgacagcgagggcaacgagacgcccgggggcuacugccugacccgguggaugcugaucgaggccgagcucaagugcuucgggaacaccgccguggccaagugcaacgagaagcacgacgaggaguucugcgacaugcugcgccuguucgacuucaacaagcaggcgauccggcgccucaagaccgaggcccagauguccauccagcugaucaacaaggccgucaacgcccugaucaacgaccagcucaucaugaagaaccaccuccgggacaucaugggcauccccuacugcaacuacagcaaguacugguaccugaaccacacggugaccgggaagaccucccugccccgcugcuggcuggugagcaacggcuccuaccugaacgagacccacuucagcgacgacaucgagcagcaggccgacaacaugaucacggagcuccugcagaaggaguacaucgaccggcagggcaagaccccgcuggggcuggucgaccucuucguguucuccaccagcuucuaccugaucuccaucuuccugcaccucgugaagaucccgugaggacuaguaauaaggaaacuguaugaaugucugugggcaggaagugaagagauccuucuguaaagguuuuuggaauuaugucugcugaauaauaaacuuuuuugaaauaauaaaucugguagaaaaaugagaucuaaaaaaaaaaaaaaaaaaaaaaaaaaaaaaaaaaaaaaaaaaaaaaaaaaaaaaaaaaaaaaaaaaaaaaaaaaaaaaaaaaaaaaaaaaaaaaaaaaaa

SEQ ID NO: 42832 - RNA, 1671 nt, Artificial Sequence
  mRNA product Design b-4 (A100) comprising derived and/or modified sequence from LASV(Lassa virus/H.sapiens-wt/NGA/2016/ISTH_0009;Clade II)__AVO03571__GPCmut13 (opt1)
aggagagucccgcagucggcguccagcggcucugcuuguucgugugugugucguugcaggccuuauucaagcuuaccaugggccagaucaucaccuucuuccaggaggugccccacgucaucgaggaggugaugaacaucgugcugaucgcccucagccugcuggccauccucaaggggaucuacaacgucgcgaccugcggccugcuggggcucguguccuuccugcugcucugcggccgcagcugcuccacgaccuacaaggggguguacgagcugcagacccuggagcucgacauggccagccugaacaugaccaugccgcuguccugcacgaagaacaacagccaccacuacaucauggucggcaacgagaccggccucgagcugacccugaccaacacguccaucaucaaccacaaguucugcaaccucagcgacgcccacaagaagaaccuguacgaccacgcccugauguccaucaucagcaccuuccaccucuccauccccaacuucaaccaguacgaggccaugagcugcgacuucaacgggggccggaucuccgugcaguacaaccugagccacuccuacgcgguggacgccgccaaccacugcgggaccaucgccaacggcguccugcagaccuucaugcgcauggcguggggcgggagcuacaucgcccucgacuccggcaaggggagcugggacugcaucaugacguccuaccaguaccugaucauccagaacaccaccugggaggaccacugccaguucagccggcccagccccaucggcuaccuggggcuccugucccagcgcacccgggacaucuacaucagccgccggcugcucggcacguucaccuggacccuguccgacagcgagggcaacgagacccccgggggcuacugccugacgcgcuggaugcucaucgaggccgagcugaagugcuucgggaacaccgccguggccaagugcaacgagaagcacgacgaggaguucugcgacaugcugcggcuguucgacuucaacaagcaggcgauccgccggcugaagaccgaggcccagauguccauccagcugaucaacaaggccgugaacgcccucaucaacgaccagcugaucaugaagaaccaccuccgcgacaucaugggcaucccguacugcaacuacagcaaguacugguaccucaaccacaccgucacggggaagaccucccugccccggugcuggcuggugagcaacggcuccuaccucaacgagacccacuucagcgacgacaucgagcagcaggccgacaacaugaucaccgagcugcugcagaaggaguacaucgaccgccagggcaagacgccccuggggcucguggaccuguucgucuucuccaccagcuucuaccugaucuccaucuuccuccaccuggugaagaucccgugaggacuaguaauaaggaaacuguaugaaugucugugggcaggaagugaagagauccuucuguaaagguuuuuggaauuaugucugcugaauaauaaacuuuuuugaaauaauaaaucugguagaaaaaugagaucuaaaaaaaaaaaaaaaaaaaaaaaaaaaaaaaaaaaaaaaaaaaaaaaaaaaaaaaaaaaaaaaaaaaaaaaaaaaaaaaaaaaaaaaaaaaaaaaaaaaa

SEQ ID NO: 42833 - RNA, 1671 nt, Artificial Sequence
  mRNA product Design b-4 (A100) comprising derived and/or modified sequence from LASV(Lassa virus/H.sapiens-wt/NGA/2016/ISTH_0017;Clade II)__AVO03567__GPCmut13 (opt1)
aggagagucccgcagucggcguccagcggcucugcuuguucgugugugugucguugcaggccuuauucaagcuuaccaugggccagaucaucaccuucuuccaggaggugccccacgucaucgaggaggugaugaacaucgugcugaucgcccucagccugcuggccauccucaaggggaucuacaacgucgcgaccugcggccuguucgggcugguguccuuccuccugcugugcggccgcagcugcuccacgaccuacaaggggguguacgagcuccagacccuggagcuggacauggccagccucaacaugaccaugccgcuguccugcacgaagaacaacagccaccacuacaucauggucggcaacgagaccggccuggagcucacccugaccaacacguccaucaucaaccacaaguucugcaaccugagcgacgcccacaagaagaaccucuacgaccacgcccugauguccaucaucagcaccuuccaccuguccauccccaacuucaaccaguacgaggccaugagcugcgacuucaacgggggcaagaucuccgugcaguacaaccucagccacaccuacgcgaucgacgccgccaaccacugcgggaccaucgccaacggcgugcugcagacguucaugcggauggcguggggcggguccuacaucgcccuggacagcggcaagggguccugggacugcaucaugaccagcuaccaguaccucaucauccagaacaccaccugggaggaccacugccaguucucccgccccagccccaucggcuaccuggggcugcucagccagcggacgcgcgacaucuacaucucccggcgccugcugggcaccuucaccuggacccucagcgacuccgagggcaacgagacgcccgggggcuacugccugacccgguggaugcugaucgaggccgagcucaagugcuucgggaacaccgccgucgccaagugcaacgagaagcacgacgaggaguucugcgacaugcugcgccuguucgacuucaacaagcaggcgauccggcgccucaagaccgaggcccagaugagcauccagcugaucaacaaggccgugaacgcccugaucaacgaccagcucaucaugaagaaccaccuccgggacaucaugggcauccccuacugcaacuacuccaaguacugguaccugaaccacacggugaccgggaagaccagccugccccgcugcuggcuggucuccaacggcagcuaccugaacgagacccacuucuccgacgacaucgagcagcaggccgacaacaugaucacggagcuccugcagaaggaguacauggaccggcagggcaagaccccgcuggggcugguggaccucuucguguucagcaccuccuucuaccugaucagcaucuuccugcaccucguccgcaucccgugaggacuaguaauaaggaaacuguaugaaugucugugggcaggaagugaagagauccuucuguaaagguuuuuggaauuaugucugcugaauaauaaacuuuuuugaaauaauaaaucugguagaaaaaugagaucuaaaaaaaaaaaaaaaaaaaaaaaaaaaaaaaaaaaaaaaaaaaaaaaaaaaaaaaaaaaaaaaaaaaaaaaaaaaaaaaaaaaaaaaaaaaaaaaaaaaa

SEQ ID NO: 42834 - RNA, 1671 nt, Artificial Sequence
  mRNA product Design b-4 (A100) comprising derived and/or modified sequence from LASV(Lassa virus/H.sapiens-wt/NGA/2018/ISTH_0959;Clade II)__AVV65099__GPCmut13 (opt1)
aggagagucccgcagucggcguccagcggcucugcuuguucgugugugugucguugcaggccuuauucaagcuuaccaugggccagaucaucaccuucuuccaggaggugccccacgucaucgaggaggugaugaacaucgugcugaucgcccucagccugcuggccauccucaaggggaucuacaacgucgugaccugcggccuguucgggcugguguccuuccuccugcugugcggccgcagcugcuccacgaccuacaagggggucuacgagcuccagacccuggagcuggacauggcgagccucaacaugaccaugccgcuguccugcacgaagaacaacagccaccacuacaucauggugggcaacgagaccggccuggagcucacccugaccaacacguccaucaucaaccacaaguucugcaaccugagcgacgcccacaagaagaaccucuacgaccacgcccugauguccaucaucagcaccuuccaccuguccauccccaacuucaaccaguacgaggccaugagcugcgacuucaacgggggcaagaucuccgugcaguacaaccucagccacgccuacgcgaucgacgccgccaaccacugcgggaccaucgccaacggcguccugcagaccuucaugcggauggcguggggcggguccuacaucgcccuggacagcggcaagggguccugggacugcaucaugacgagcuaccaguaccucaucauccagaacaccaccugggaggaccacugccaguucucccgccccagccccaucggcuaccuggggcugcucagccagcggacccgcgacaucuacaucucccggcgccugcugggcacguucaccuggacccucagcgacuccgagggcaacgagacccccgggggcuacugccugacgcgguggaugcugaucgaggccgagcucaagugcuucgggaacaccgccguggccaagugcaacgagaagcacgacgaggaguucugcgacaugcugcgccuguucgacuucaacaagcaggcgauccggcgccucaagaccgaggcccagaugagcauccagcugaucaacaaggccgugaacgcccugaucaacgaccagcucaucaugaagaaccaccuccgggacaucaugggcaucccguacugcaacuacuccaaguacugguaccugaaccacaccgucacggggaagaccagccugccccgcugcuggcugguguccaacggcagcuaccugaacgagacccacuucuccgacgacaucgagcagcaggccgacaacaugaucaccgagcuccugcagaaggaguacaucgaccggcagggcaagacgccccuggggcugguggaccucuucgucuucagcaccuccuucuaccugaucagcaucuuccugcaccucgugaagaucccgugaggacuaguaauaaggaaacuguaugaaugucugugggcaggaagugaagagauccuucuguaaagguuuuuggaauuaugucugcugaauaauaaacuuuuuugaaauaauaaaucugguagaaaaaugagaucuaaaaaaaaaaaaaaaaaaaaaaaaaaaaaaaaaaaaaaaaaaaaaaaaaaaaaaaaaaaaaaaaaaaaaaaaaaaaaaaaaaaaaaaaaaaaaaaaaaaa

SEQ ID NO: 42835 - RNA, 1671 nt, Artificial Sequence
  mRNA product Design b-4 (A100) comprising derived and/or modified sequence from LASV(LASV003-NIG-2008;Clade II)__AIT17580__GPCmut13 (opt1)
aggagagucccgcagucggcguccagcggcucugcuuguucgugugugugucguugcaggccuuauucaagcuuaccaugggccagaucaucaccuucuuccaggaggugccccacgucaucgaggaggugaugaacaucgugcugaucgcccucagccugcuggccauccucaaggggaucuacaacgucgcgaccugcggccuguucgggcugguguccuuccuccugcugugcggccgcagcugcuccacgaccuacaaggggguguacgagcuccagacccuggagcuggacauggccagccucaacaugaccaugccgcuguccugcacgaagaacaacagccaccacuacaucauggucggcaacgagaccggccuggagcucacccugaccaacacguccaucaucaaccacaaguucugcaaccugagcgacgcccacaagaagaaccucuacgaccacgcccugauguccaucaucagcaccuuccaccuguccauccccaacuucaaccaguacgaggccaugagcugcgacuucaacgggggcaagaucuccgugcaguacaaccucagccacaccuacgcgguggacgccgccaaccacugcgggaccaucgccaacggcguccugcagacguucaugcggauggcguggggcggguccuacaucgcccuggacagcggcaagggguccugggacugcaucaugaccagcuaccaguaccucaucauccagaacaccaccugggaggaccacugccaguucucccgccccagccccaucggcuaccuggggcugcucagccagcggacgcgcgacaucuacaucucccggcgccugcugggcaccuucaccuggacccucagcgacuccgagagcaacgagacgccgggcggguacugccugacccgguggaugcugaucgaggccgagcucaagugcuucggcaacaccgccguggccaagugcaacgagaagcacgacgaggaguucugcgacaugcugcgccuguucgacuucaacaagcaggcgauccggcgccucaaggccgaggcccagauguccauccagcugaucaacaaggccgugaacgcccugaucaacgaccagcucaucaugaagaaccaccuccgggacaucauggggauccccuacugcaacuacagcaaguacugguaccugaaccacaccgucacgggccgcaccucccugccccggugcuggcuggugagcaacggguccuaccugaacgagacccacuucagcgacgacaucgagcagcaggcggacaacaugaucaccgagcuccugcagaaggaguacauggaccgccagggcaagacgccccugggccugguggaccucuucgucuucuccaccagcuucuaccugaucuccaucuuccugcaccucgugaagaucccgugaggacuaguaauaaggaaacuguaugaaugucugugggcaggaagugaagagauccuucuguaaagguuuuuggaauuaugucugcugaauaauaaacuuuuuugaaauaauaaaucugguagaaaaaugagaucuaaaaaaaaaaaaaaaaaaaaaaaaaaaaaaaaaaaaaaaaaaaaaaaaaaaaaaaaaaaaaaaaaaaaaaaaaaaaaaaaaaaaaaaaaaaaaaaaaaaa

SEQ ID NO: 42836 - RNA, 1671 nt, Artificial Sequence
  mRNA product Design b-4 (A100) comprising derived and/or modified sequence from LASV(LASV035-NIG-2009;Clade II)__AIT17588__GPCmut13 (opt1)
aggagagucccgcagucggcguccagcggcucugcuuguucgugugugugucguugcaggccuuauucaagcuuaccaugggccagaucaucaccuucuuccaggaggugccccacgucaucgaggaggugaugaacaucgugcugaucgcccucagccugcuggccauccucaaggggaucuacaacgucgcgaccugcggccuguucgggcugguguccuuccuccugcugugcggccgcagcugcuccacgaccuacaaggggguguacgagcuccagacccuggagcuggacauggccagccucaacaugaccaugccgcuguccugcacgaagaacaacagccaccacuacaucauggucggcaacgagaccggccuggagcucacccugaccaacacguccaucaucaaccacaaguucugcaaccugagcgacgcccacaagaagaaccucuacgaccacgcccugauguccaucaucagcaccuuccaccuguccauccccaacuucaaccaguacgaggccaugagcugcgacuucaacgggggcaagaucuccgugcaguacaaccucagccacgcguacgccguggacgccgccaaccacugcgggaccaucgcgaacggcguccugcagaccuucaugcggauggccuggggcggguccuacaucgcccuggacagcggcaagggguccugggacugcaucaugacgagcuaccaguaccucaucauccagaacaccaccugggaggaccacugccaguucucccgccccagccccaucggcuaccuggggcugcucagccagcggacccgcgacaucuacaucucccggcgccugcugggcacguucaccuggacccucagcgacuccgagggcaacgagacccccgggggcuacugccugacgcgguggaugcugaucgaggccgagcucaagugcuucgggaacaccgccguggcgaagugcaacgagaagcacgacgaggaguucugcgacaugcugcgccuguucgacuucaacaagcaggccauccggcgccucaaggccgaggcccagaugagcauccagcugaucaacaaggccgugaacgcgcugaucaacgaccagcucaucaugaagaaccaccuccgggacaucaugggcauccccuacugcaacuacuccaaguacugguaccugaaccacaccgucaccgggaagacgagccugccccgcugcuggcugguguccaacggcagcuaccugaacgagacccacuucuccgacgacaucgagcagcaggccgacaacaugaucaccgagcuccugcagaaggaguacaucgaccggcagggcaagaccccgcuggggcugguggaccucuucgucuucagcacguccuucuaccugaucagcaucuuccugcaccucgugaagaucccgugaggacuaguaauaaggaaacuguaugaaugucugugggcaggaagugaagagauccuucuguaaagguuuuuggaauuaugucugcugaauaauaaacuuuuuugaaauaauaaaucugguagaaaaaugagaucuaaaaaaaaaaaaaaaaaaaaaaaaaaaaaaaaaaaaaaaaaaaaaaaaaaaaaaaaaaaaaaaaaaaaaaaaaaaaaaaaaaaaaaaaaaaaaaaaaaaa

SEQ ID NO: 42837 - RNA, 1671 nt, Artificial Sequence
  mRNA product Design b-4 (A100) comprising derived and/or modified sequence from LASV(LASV1000-NIG-2009;Clade II)__AIT17782__GPCmut13 (opt1)
aggagagucccgcagucggcguccagcggcucugcuuguucgugugugugucguugcaggccuuauucaagcuuaccaugggccagaucaucaccuucuuccaggaggugccccacgucaucgaggaggugaugaacaucgugcugaucgcccucagccugcuggccauccucaaggggaucuacaacgucgcgaccugcggccuguucgggcugguguccuuccuccugcugugcggccgcagcugcuccacgaccuacaaggggguguacgagcuccagacccuggagcuggacauggccagccucaacaugaccaugccgcuguccugcacgaagaacaacagccaccacuacaucauggucggcaacgagaccggccuggagcucacccugaccaacacguccaucaucaaccacaaguucugcaaccugagcgacgcccacaagaagaaccucuacgaccacgcccugauguccaucaucagcaccuuccaccuguccauccccaacuucaaccaguacgaggccaugagcugcgacuucaacgggggcaagaucuccgugcaguacaaccucagccacaccuacgcgguggacgccgccaaccacugcgggaccaucgccaacggcguccugcagacguucaugcggauggcguggggcggguccuacaucgcccuggacagcggcaagggguccugggacugcaucaugaccagcuaccaguaccucaucauccagaacaccaccugggaggaccacugccaguucucccgccccagccccaucggcuaccuggggcugcucagccagcggacgcgcgacaucuacaucucccggcgccugcugggcaccuucaccuggacccucagcgacuccgagggcaacgagacgcccgggggcuacugccugacccgguggaugcugaucgaggccgagcucaagugcuucgggaacaccgccguggccaagugcaacgagaagcacgacgaggaguucugcgacaugcugcgccuguucgacuucaacaagcaggcgaucaagcggcucaagaccgaggcccagaugagcauccagcugaucaacaaggccgugaacgcccugaucaacgaccagcucaucaugaagaaccaccuccgcgacaucaugggcauccccuacugcaacuacuccaaguacugguaccugaaccacacggucaccgggaagaccagccugccccggugcuggcugguguccaacggcagcuaccugaacgagacccacuucuccgacgacaucgagcagcaggccgacaacaugaucacggagcuccugcagaaggaguacaucgaccgccagggcaagaccccgcuggggcugguggaccucuucgucuucagcaccuccuucuaccugaucagcaucuuccugcaccucgugaagaucccgugaggacuaguaauaaggaaacuguaugaaugucugugggcaggaagugaagagauccuucuguaaagguuuuuggaauuaugucugcugaauaauaaacuuuuuugaaauaauaaaucugguagaaaaaugagaucuaaaaaaaaaaaaaaaaaaaaaaaaaaaaaaaaaaaaaaaaaaaaaaaaaaaaaaaaaaaaaaaaaaaaaaaaaaaaaaaaaaaaaaaaaaaaaaaaaaaa

SEQ ID NO: 42838 - RNA, 1671 nt, Artificial Sequence
  mRNA product Design b-4 (A100) comprising derived and/or modified sequence from LASV(LASV221-NIG-2010;Clade II)__AIT17624__GPCmut13 (opt1)
aggagagucccgcagucggcguccagcggcucugcuuguucgugugugugucguugcaggccuuauucaagcuuaccaugggccagaucaucaccuucuuccaggaggugccccacgucaucgaggaggugaugaacaucgugcugaucgcccucagccugcuggccauccucaaggggaucuacaacgucgcgaccugcggccuguucgggcugguguccuuccuccugcugugcggccgcagcugcuccacgaccuacaaggggguguacgagcuccagacccuggagcuggacauggccagccucaacaugaccaugccgcuguccugcacgaagaacaacagccaccacuacaucauggucggcaacgagaccggccuggagcucacccugaccaacacguccaucaucaaccacaaguucugcaaccugagcgacgcccacaagaagaaccucuacgaccacgcccugauguccaucaucagcaccuuccaccuguccauccccaacuucaaccaguacgaggccaugagcugcgacuucaacgggggcaagaucuccgugcaguacaaccucagccacaccuacgcgaucgacgccgccaaccacugcgggaccaucgccaacggcgugcugcagacguucaugcggauggcguggggcggguccuacaucgcccuggacagcggcaagggguccugggacugcaucaugaccagcuaccaguaccucaucauccagaacaccaccugggaggaccacugccaguucucccgccccagccccaucggcuaccuggggcugcucagccagcggacgcgcgacaucuacaucucccggcgccugcugggcaccuucaccuggacccucagcgacuccgagggcaacgagacgcccgggggcuacugccugacccgguggaugcugaucgaggccgagcucaagugcuucgggaacaccgccgucgccaagugcaacgagaagcacgacgaggaguucugcgacaugcugcgccuguucgacuucaacaagcaggcgauccggcgccucaagaccgaggcccagaugagcauccagcugaucaacaaggccgugaacgcccugaucaacgaccagcucaucaugaagaaccaccuccgggacaucaugggcauccccuacugcaacuacuccaaguacugguaccugaaccacacggugaccgggaagaccagccugccccgcugcuggcuggucuccaacggcagcuaccugaacgagacccacuucuccgacgacaucgagcagcaggccgacaacaugaucacggagaugcuccagaaggaguacauggaccggcagggcaagaccccgcuggggcugguggaccuguucguguucagcaccuccuucuaccucaucagcaucuuccugcaccuggucaagaucccgugaggacuaguaauaaggaaacuguaugaaugucugugggcaggaagugaagagauccuucuguaaagguuuuuggaauuaugucugcugaauaauaaacuuuuuugaaauaauaaaucugguagaaaaaugagaucuaaaaaaaaaaaaaaaaaaaaaaaaaaaaaaaaaaaaaaaaaaaaaaaaaaaaaaaaaaaaaaaaaaaaaaaaaaaaaaaaaaaaaaaaaaaaaaaaaaaa

SEQ ID NO: 42839 - RNA, 1671 nt, Artificial Sequence
  mRNA product Design b-4 (A100) comprising derived and/or modified sequence from LASV(LASV237-NIG-2010;Clade II)__AIT17638__GPCmut13 (opt1)
aggagagucccgcagucggcguccagcggcucugcuuguucgugugugugucguugcaggccuuauucaagcuuaccaugggccagaucaucaccuucuuccaggaggugccccacgucaucgaggaggugaugaacaucgugcugaucgcccucagccugcuggccauccucaaggggaucuacaacgucgcgaccugcggccuguucgggcugguguccuuccuccugcugugcggccgcagcugcuccacgaccuacaaggggguguacgagcuccagacccuggagcuggacauggccagccucaacaugaccaugccgcuguccugcacgaagaacaacagccaccacuacaucauggucggcaacgagaccggccuggagcucacccugaccaacacguccaucaucaaccacaaguucugcaaccugagcgacgcccacaagaaggaccucuacgaccacgcccugauguccaucaucagcaccuuccaccuguccauccccaacuucaaccaguacgaggccaugagcugcgacuucaacgggggcaagaucuccgugcaguacaaccucagccacaccuacgcgguggacgccgccaaccacugcgggaccaucgccaacggcguccugcagacguucaugcggauggcguggggcggguccuacaucgcccuggacagcggcaagggguccugggacugcaucaugaccagcuaccaguaccucaucauccagaacaccaccugggaggaccacugccaguucucccgccccagccccaucggcuaccuggggcugcucagccagcggacgcgcgacaucuacaucucccggcgccugcugggcaccuucaccuggacccucagcgacuccgagggcaacgagacgcccgggggcuacugccugacccgguggaugcugaucgaggccgagcucaagugcuucgggaacaccgccguggccaagugcaacgagaagcacgacgaggaguucugcgacaugcugcgccuguucgacuucaacaagcaggcgauccggcgccucaagaccgaggcccagaugagcauccagcugaucaacaaggccgugaacgcccugaucaacgaccagcucaucaugaagaaccaccuccgggacaucaugggcauccccuacugcaacuacuccaaguacugguaccugaaccacacggucaccgggaagaccagccugccccgcugcuggcugguguccaacggcagcuaccugaacgagacccacuucuccgacgacaucgagcagcaggccgacaacaugaucacggagcuccugcagaaggaguacauggaccggcagggcaagaccccgcuggggcugguggaccucuucgucuucagcaccuccuucuaccugaucagcaucuuccugcaccucaucaagaucccgugaggacuaguaauaaggaaacuguaugaaugucugugggcaggaagugaagagauccuucuguaaagguuuuuggaauuaugucugcugaauaauaaacuuuuuugaaauaauaaaucugguagaaaaaugagaucuaaaaaaaaaaaaaaaaaaaaaaaaaaaaaaaaaaaaaaaaaaaaaaaaaaaaaaaaaaaaaaaaaaaaaaaaaaaaaaaaaaaaaaaaaaaaaaaaaaaa

SEQ ID NO: 42840 - RNA, 1671 nt, Artificial Sequence
  mRNA product Design b-4 (A100) comprising derived and/or modified sequence from LASV(LASV253-NIG-2011;Clade II)__AIT17670__GPCmut13 (opt1)
aggagagucccgcagucggcguccagcggcucugcuuguucgugugugugucguugcaggccuuauucaagcuuaccaugggccagaucaucaccuucuuccaggaggugccccacgucaucgaggaggugaugaacaucgugcugaucgcccucagccugcuggccauccucaaggggaucuacaacgucgcgaccugcggccuguucgggcugguguccuuccuccugcugugcggccgcagcugcuccacgaccuacaaggggguguacgagcuccagacccuggagcuggacauggccagccucaacaugaccaugccgcuguccugcacgaagaacaacagccaccacuacaucauggucggcaacgagaccggccuggagcucacccugaccaacacguccaucaucaaccacaaguucugcaaccugagcgacgcccacaagaagaaccucuacgaccacgcccugauguccaucaucagcaccuuccaccuguccauccccaacuucaaccaguacgaggccaugagcugcgacuucaacgggggcaagaucuccgugcaguacaaccucagccacaccuacgcgguggacgccgccaaccacugcgggaccaucgccaacggcguccugcagacguucaugcggauggcguggggcggguccuacaucgcccuggacagcggcaagggguccugggacugcaucaugaccagcuaccaguaccucaucauccagaacaccaccugggaggaccacugccaguucucccgccccagccccaucggcuaccuggggcugcucagccagcggacgcgcgacaucuacaucucccggcgccugcugggcaccuucaccuggacccucagcgacuccgagggcaacgagacgcccgggggcuacugccugacccgguggaugcugaucgaggccgagcucaagugcuucgggaacaccgccguggccaagugcaacgagaagcacgacgaggaguucugcgacaugcugcgccuguucgacuucaacaagcaggcgauccggcgccucaaggccgaggcccagaugagcauccagcugaucaacaaggccgugaacgcccugaucaacgaccagcucaucaugaagaaccaccuccgggacaucaugggcaucccguacugcaacuacuccaaguacugguaccugaaccacaccgucacggggcgcaccagccugccccggugcuggcugguguccaacggcagcuaccugaacgagacccacuucuccgacgacaucgagcagcaggcggacaacaugaucaccgagcuccugcagaaggaguacaucgaccgccagggcaagacgccccuggggcugguggaccucuucgucuucagcaccuccuucuaccugaucagcaucuuccugcaccucgugaagaucccgugaggacuaguaauaaggaaacuguaugaaugucugugggcaggaagugaagagauccuucuguaaagguuuuuggaauuaugucugcugaauaauaaacuuuuuugaaauaauaaaucugguagaaaaaugagaucuaaaaaaaaaaaaaaaaaaaaaaaaaaaaaaaaaaaaaaaaaaaaaaaaaaaaaaaaaaaaaaaaaaaaaaaaaaaaaaaaaaaaaaaaaaaaaaaaaaaa

SEQ ID NO: 42841 - RNA, 1671 nt, Artificial Sequence
  mRNA product Design b-4 (A100) comprising derived and/or modified sequence from LASV(LASV254-NIG-2011;Clade II)__AIT17674__GPCmut13 (opt1)
aggagagucccgcagucggcguccagcggcucugcuuguucgugugugugucguugcaggccuuauucaagcuuaccaugggccagaucaucaccuucuuccaggaggugccccacgucaucgaggaggugaugaacaucgugcugaucgcccucagccugcuggccauccucaaggggaucuacaacgucgcgaccugcggccuguucgggcugguguccuuccuccugcugugcggccgcagcugcuccacgaccuacaaggggguguacgagcuccagacccuggagcuggacaugaccaaccucaacaugacgaugccgcugagcugcaccaagaacaacucccaccacuacaucauggucggcaacgagaccggccuggagcucacccugacgaacaccagcaucaucaaccacaaguucugcaaccuguccgacgcccacaagaagaaccucuacaaccacgcccugaugagcaucaucuccaccuuccaccugagcauccccaacuucaaccaguacgaggccauguccugcgacuucaacgggggcaagaucagcgugcaguacaaccucucccacagcuacgccguggacgcggccaaccacugcgggaccaucgccaacggcguccugcagacguucaugcggauggccuggggcggguccuacaucgcgcuggacagcggcaaggggaacugggacugcaucaugaccuccuaccaguaccucaucauccagaacaccaccugggaggaccacugccaguucagccgccccucccccaucggcuaccuggggcugcucagccagcggacgcgcgacaucuacaucagccggcgccugcugggcaccuucaccuggacccucuccgacagcgagggcaacgagacgcccgggggcuacugccugacccgguggaugcugaucgaggccgagcucaagugcuucgggaacaccgccguggccaagugcaacgagaagcacgacgaggaguucugcgacaugcugcgccuguucgacuucaacaagcaggccauccggcgccucaagaccgaggcgcaggccaacauccagcugaucaacaaggccgugaacgcccugaucaacgaccagcucaucaugaagaaccaccuccgggacaucaugggcauccccuacugcaacuacuccaaguacugguaccugaaccacacggucaccgggaagaccagccugccccgcugcuggcugguguccaacggcagcuaccugaacgagacccacuucuccgacgacaucgagcagcaggccgacaacaugaucacggagcuccugcagaaggaguacauggaccggcagggcaagaccccgcuggggcugguggaccucuucgucuucagcaccuccuucuaccugaucagcaucuuccugcaccucgugaagaucccgugaggacuaguaauaaggaaacuguaugaaugucugugggcaggaagugaagagauccuucuguaaagguuuuuggaauuaugucugcugaauaauaaacuuuuuugaaauaauaaaucugguagaaaaaugagaucuaaaaaaaaaaaaaaaaaaaaaaaaaaaaaaaaaaaaaaaaaaaaaaaaaaaaaaaaaaaaaaaaaaaaaaaaaaaaaaaaaaaaaaaaaaaaaaaaaaaa

SEQ ID NO: 42842 - RNA, 1671 nt, Artificial Sequence
  mRNA product Design b-4 (A100) comprising derived and/or modified sequence from LASV(Nig08-A19;Clade III)__ADU56618__GPCmut13 (opt1)
aggagagucccgcagucggcguccagcggcucugcuuguucgugugugugucguugcaggccuuauucaagcuuaccaugggccagaucgugaccuucuuccaggaggucccccacgugaucgaggaggugaugaacaucguccugaucgcccucagcauccuggccauccugaaggggcucuacaacaucgcgaccugcggccugaucgggcuggugacguuccuccugcuguccggccgcagcugcuccaugaccuacaaggggguguacgagcuccagacccuggagcugaacaugaacacccucaacaugacgaugccgcugagcugcaccaagaacaacucccaccacuacaucauggucggcaacgagaccggccuggagcucacccugacgaacaccagccugcuccaccacaaguucugcaaccuguccgacgcccacaagaagaaccuguacgaccacacccucaugagcaucaucuccaccuuccaccugagcauccccaacuucaaccaguacgaggccauguccugcgacuucaacgggggcaagaucacggugcaguacaaccugagccacuccuacgccaucgacgccgcgaaccacugcgggaccguggccaacggcguccuccagaccuucaugcggauggccuggggcgggagcuacaucgcccuggacuccggccgcgggaagugggacugcaucaugaccagcuaccaguaccugaucauccagaacacgaccugggaggaccacugccaguucucccggcccagccccaucggcuaccucgggcugcugucccagcgcacccgggacaucuacaucagccgccggcuccugggcaccuucacguggacccugagcgacuccgagggcaacgagacccccgggggcuacugccucacccgcuggaugcugaucgaggcggagcugaagugcuucgggaacacggccguggccaagugcaacgagaagcacgacgaggaguucugcgacaugcuccggcuguucgacuucaacaagcaggccauccgccggcugaaggccgaggcgcagaugagcauccagcucaucaacaaggccgugaacgcccugaucaacgaccagcugaucaugaagaaccaccuccgcgacaucaugggcauccccuacugcaacuacuccaaguacugguaccugaaccacaccagcaccgggcggaccucccugccccgcugcuggcucgucagcaacggcuccuaccugaacgagacgcacuucagcgacgacaucgagcagcaggccgacaacaugaucaccgagaugcugcagaaggaguaccuggaccggcagggcaagaccccgcucgggcugguggaccuguucguguucuccaccagcuucuaccucaucuccaucuuccugcaccuggucaagaucccgugaggacuaguaauaaggaaacuguaugaaugucugugggcaggaagugaagagauccuucuguaaagguuuuuggaauuaugucugcugaauaauaaacuuuuuugaaauaauaaaucugguagaaaaaugagaucuaaaaaaaaaaaaaaaaaaaaaaaaaaaaaaaaaaaaaaaaaaaaaaaaaaaaaaaaaaaaaaaaaaaaaaaaaaaaaaaaaaaaaaaaaaaaaaaaaaaa

SEQ ID NO: 42843 - RNA, 1674 nt, Artificial Sequence
  mRNA product Design b-4 (A100) comprising derived and/or modified sequence from LASV(G1180-SLE-2010;Clade IV)__AIT17168__GPCmut13 (opt1)
aggagagucccgcagucggcguccagcggcucugcuuguucgugugugugucguugcaggccuuauucaagcuuaccaugggccagaucgugaccuucuuccaggaggucccccacgugaucgaggaggugaugaacaucguccugaucgcccucagcauccuggccgugcugaaggggcucuacaacuucgcgaccugcggccugguggggcugcucaccuuccugcugcucugcggccgcuccugcaccgccagccgguacaagggggucuacgagcugcagacccuggagcucaacauggagacccugaacaugacgaugccgcuguccugcaccaagaacaacagccaccacuacaucauggugggcaacgagaccggccucgagcugacccugacgaacaccuccaucaucaaccacaaguucugcaaccucagcgacgcccacaagaagaaccuguacgaccacgcccugauguccaucaucagcaccuuccaccucuccauccccaacuucaaccaguacgaggccaugagcugcgacuucaacgggggcaagaucuccgugcaguacaaccugagccacuccuacgcgggggacgccgccaaccacugcggcaccgucgccaacggggugcugcagacguucaugcgcauggcguggggcggcagcuacaucgcccucgacuccgggcacggcagcugggacugcaucaugaccuccuaccaguaccugaucauccagaacaccaccugggaggaccacugccaguucagccggcccucccccaucggguaccugggccuccugagccagcgcacgcgggacaucuacaucagccgccggcugcucggcaccuucaccuggacccuguccgacagcgaggggaaggacacgccgggcggguacugccugacccgcuggaugcucaucgaggccgagcugaagugcuucggcaacaccgccguggccaagugcaacgagaagcacgacgaggaguucugcgacaugcugcggcuguucgacuucaacaagcaggcgauccagcgccugaaggccgaggcccagauguccauccagcugaucaacaaggccgucaacgcccucaucaacgaccagcugaucaugaagaaccaccuccgggacaucauggggauccccuacugcaacuacagcaaguacugguaccucaaccacaccacgaccggcaagaccucccugcccaagugcuggcuggugagcaacggcuccuaccucaacgagacccacuucagcgacgacaucgagcagcaggcggacaacaugaucacggagaugcugcagaaggaguacauggagcgccaggggaagacgccccugggccugguggaccucuucgucuucuccaccagcuucuaccugaucuccaucuuccugcaccucgugaagaucccgugaggacuaguaauaaggaaacuguaugaaugucugugggcaggaagugaagagauccuucuguaaagguuuuuggaauuaugucugcugaauaauaaacuuuuuugaaauaauaaaucugguagaaaaaugagaucuaaaaaaaaaaaaaaaaaaaaaaaaaaaaaaaaaaaaaaaaaaaaaaaaaaaaaaaaaaaaaaaaaaaaaaaaaaaaaaaaaaaaaaaaaaaaaaaaaaaa

SEQ ID NO: 42844 - RNA, 1674 nt, Artificial Sequence
  mRNA product Design b-4 (A100) comprising derived and/or modified sequence from LASV(G1442-SLE-2011;Clade IV)__AIT17180__GPCmut13 (opt1)
aggagagucccgcagucggcguccagcggcucugcuuguucgugugugugucguugcaggccuuauucaagcuuaccaugggccagaucgugaccuucuuccaggaggucccccacgugaucgaggaggugaugaacaucguccugaucgcccucagcauccuggccgugcugaaggggcucuacaacguggcgaccugcggccugaucgggcuggucacguuccuccugcugugcggccgcuccugcaccaccacccucuacaaggggguguacgagcugcagacgcuggagcucaacauggagacccugaacaugaccaugccgcugagcugcaccaagaacaacucccaccacuacauccgggugggcaacgagacgggccucgagcugacccugaccaacaccagcaucaucaaccacaaguucugcaaccucuccgacgcccacaagaagaaccuguacgaccacgcccugaugagcaucaucuccacguuccaccucagcauccccaacuucaaccaguacgaggccauguccugcgacuucaacgggggcaagaucagcguccaguacaaccugucccacagcuacgccggggacgcggccaaccacugcggcaccguggccaacggggugcugcagaccuucaugcgcauggccuggggcggcuccuacaucgcgcucgacagcgggcggggcaacugggacugcaucaugaccuccuaccaguaccugaucauccagaacacgaccugggacgaccacugccaguucagccgccccucccccaucggguaccugggccuccugagccagcggacccgcgacgucuacaucucccggcgccugcucggcaccuucacguggacccugagcgacagcgaggggaaggacaccccgggcggguacugccugacccgguggaugcucaucgaggccgagcugaagugcuucggcaacacggccguggccaagugcaacgagaagcacgacgaggaguucugcgacaugcugcgccucuucgacuucaacaagcaggccauccagcggcugaaggcggaggcccagauguccauccagcugaucaacaaggccgugaacgcccucaucaacgaccagcugaucaugaagaaccaccuccgcgacaucauggggauccccuacugcaacuacagcaaguacugguaccugaacaacaccgccaccggcaagaccucccugcccaagugcuggcugaucagcaacggcuccuaccucaacgagacgcacuucagcgacgacaucgagcaggaggcggacaacaugaucaccgagaugcugcagaaggaguacauggagcggcaggggaagacgccccugggccuggucgaccucuucguguucuccaccagcuucuaccugaucuccaucuuccugcaccucgugaagaucccgugaggacuaguaauaaggaaacuguaugaaugucugugggcaggaagugaagagauccuucuguaaagguuuuuggaauuaugucugcugaauaauaaacuuuuuugaaauaauaaaucugguagaaaaaugagaucuaaaaaaaaaaaaaaaaaaaaaaaaaaaaaaaaaaaaaaaaaaaaaaaaaaaaaaaaaaaaaaaaaaaaaaaaaaaaaaaaaaaaaaaaaaaaaaaaaaaa

SEQ ID NO: 42845 - RNA, 1674 nt, Artificial Sequence
  mRNA product Design b-4 (A100) comprising derived and/or modified sequence from LASV(G3010-SLE-2013;Clade IV)__AIT17344__GPCmut13 (opt1)
aggagagucccgcagucggcguccagcggcucugcuuguucgugugugugucguugcaggccuuauucaagcuuaccaugggccagaucgugaccuucuuccaggaggucccccacgugaucgaggaggugaugaacaucguccugaucgcccucagcauccuggccgugcugaaggggcucuacaacuucgcgaccugcggccugguggggcuggucacguuccuccugcugugcggccgcuccugcaccaccagccucuacaaggggguguacgagcugcagacccuggagcucaacauggagacgcugaacaugaccaugccgcuguccugcaccaagaacaacagccaccacuacaucauggugggcaacgagaccggccucgagcugacgcugaccaacaccuccaucaucaaccacaaguucugcaaccucagcgacgcccacaagaagaaccuguacaaccacgcccugauguccaucaucagcaccuuccaccucuccauccccaacuucaaccaguacgaggccaugagcugcgacuucaacgggggcaagaucuccguccaguacaaccugagccacuccuacgccggggacgcggccagccacugcggcacgguggccaacggggugcugcagaccuucaugcggauggccuggggcggcuccuacaucgcgcucgacagcggguacggcaagugggacugcaucaugaccuccuaccaguaccugaucauccagaacaccacgugggaggaccacugccaguucagccgccccucccccaucggguaccugggccuccugagccagcggacccgcgacaucuacaucagccggcgccugcucggcaccuucaccuggacgcuguccgacagcgaggggaaggacaccccgggcggguacugccugacccgguggaugcucaucgaggccgagcugaagugcuucggcaacaccgccgucgccaagugcaacgagaagcacgacgaggaguucugcgacaugcugcgccucuucgacuucaacaagcaggccauccagcggcugaagacggaggcgcagauguccauccagcugaucaacaaggccgugaacgcccucaucaacgaccagcugaucaugaagaaccaccuccgcgacaucauggggauccccuacugcaacuacagcaaguacugguaccugaaccacaccaccaccggcaagacgucccugcccaagugcuggcuggugagcaacggcuccuaccucaacgagacccacuucagcgacgacaucgagcagcaggccgacaacaugaucaccgagaugcugcagaaggaguacauggagcggcaggggaagacgccccugggccuggucgaccucuucguguucuccaccagcuucuaccugaucuccaucuuccugcaccucgugaagaucccgugaggacuaguaauaaggaaacuguaugaaugucugugggcaggaagugaagagauccuucuguaaagguuuuuggaauuaugucugcugaauaauaaacuuuuuugaaauaauaaaucugguagaaaaaugagaucuaaaaaaaaaaaaaaaaaaaaaaaaaaaaaaaaaaaaaaaaaaaaaaaaaaaaaaaaaaaaaaaaaaaaaaaaaaaaaaaaaaaaaaaaaaaaaaaaaaaa

SEQ ID NO: 42846 - RNA, 1674 nt, Artificial Sequence
  mRNA product Design b-4 (A100) comprising derived and/or modified sequence from LASV(G502-SLE-2009;Clade IV)__AIT17126__GPCmut13 (opt1)
aggagagucccgcagucggcguccagcggcucugcuuguucgugugugugucguugcaggccuuauucaagcuuaccaugggccagaucgugaccuucuuccaggaggucccccacgugaucgaggaggugaugaacaucguccugaucgcccucagcauccuggccgugcugaaggggcucuacaacuucgcgaccugcggccugguggggcugcucacguuccugcugcucugcggccgcuccugcaccaccgggcuguacaagggcgucuacgagcugcagacccucgagcugaacauggagacgcugaacaugaccaugccgcucagcugcaccaagaacaacucccaccacuacaucauggugggcaacgagaccgggcuggagcugacgcucaccaacaccagcaucaucaaccacaaguucugcaaccuguccgacgcccacaagaagaaccuguacgaccacgcccucaugagcaucaucuccaccuuccaccugagcauccccaacuucaaccaguacgaggccauguccugcgacuucaacggcgggaagaucagcgugcaguacaaccugucccacagcuacgccggcgacgcggccgaccacugcgggacggucgccaacggcgugcuccagaccuucaugcggauggccuggggcggguccuacaucgcgcuggacagcggccgcgggcggugggacugcaucaugaccuccuaccaguaccugaucauccagaacaccacgugggaggaccacugccaguucagccgccccucccccaucggcuaccucggccugcugagccagcggacccgcgacaucuacaucucccggcgccuccuggggaccuucaccuggacgcugagcgacagcgagggcaaggacacccccgggggcuacugccucacccgguggaugcugaucgaggccgagcugaagugcuucgggaacaccgccguggccaagugcaacgagaagcacgacgaggaguucugcgacaugcuccgccuguucgacuucaacaagcaggccauccagcggcugaaggcggaggcccagauguccauccagcucaucaacaaggccgucaacgcccugaucaacgaccagcuggugaugaagaaccaccuccgcgacaucaugggcauccccuacugcaacuacagccgguacugguaccugaaccacacgaccaccggccgcaccucccugcccaagugcuggcucgugagcaacggguccuaccugaacgagacgcacuucagcgacgacaucgagcagcaggccgacaacaugaucaccgagaugcugcagaaggaguacauggagcggcagggcaagaccccgcuggggcucgucgaccuguucguguucuccaccagcuucuaccugaucuccaucuuccuccaccuggugaagaucccgugaggacuaguaauaaggaaacuguaugaaugucugugggcaggaagugaagagauccuucuguaaagguuuuuggaauuaugucugcugaauaauaaacuuuuuugaaauaauaaaucugguagaaaaaugagaucuaaaaaaaaaaaaaaaaaaaaaaaaaaaaaaaaaaaaaaaaaaaaaaaaaaaaaaaaaaaaaaaaaaaaaaaaaaaaaaaaaaaaaaaaaaaaaaaaaaaa

SEQ ID NO: 42847 - RNA, 1674 nt, Artificial Sequence
  mRNA product Design b-4 (A100) comprising derived and/or modified sequence from LASV(G733-SLE-2010;Clade IV)__AIT17154__GPCmut13 (opt1)
aggagagucccgcagucggcguccagcggcucugcuuguucgugugugugucguugcaggccuuauucaagcuuaccaugggccagaucgugaccuucuuccaggaggucccccacgugaucgaggaggugaugaacaucguccugaucgcccucagcauccuggccgugcugaaggggcucuacaacuucgcgaccugcggcaucguggggcuggucuccuuccugcuccugugcggccgcagcugcacgaccucccuguacaaggggguguacgagcuccagacccuggagcugaacauggagacccucaacaugacgaugccgcugagcugcaccaagaacaacucccaccacuacaucauggugggcaacgagaccggccuggagcucacccugacgaacaccagcaucaucaaccacaaguucugcaaccuguccgacgcccacaagaagaaccucuacgaccacgcccugaugagcaucaucuccaccuuccaccugagcauccccaacuucaaccaguacgaggccauguccugcgacuucaacgggggcaagaucagcguccaguacaaccucucccacagcuacgccggggacgcggccaaccacugcggcaccaucgccaacggggugcugcagacguucaugcggauggccuggggcggcuccuacaucgcgcuggacagcgggcgcgaccggugggacugcaucaugaccuccuaccaguaccucaucauccagaacaccaccugggaggaccacugccaguucagccgccccucccccaucggcuaccuggggcugcucagccagcggacgcgcgacaucuacaucagccggcgccugcugggcaccuucaccuggacccucuccgacagcgagggcaaggacacgcccgggggcuacugccugacccgguggaugcugaucgaggccgagcucaagugcuucgggaacaccgccguggccaagugcaacgagaagcacgacgaggaguucugcgacaugcugcgccuguucgacuucaacaagcaggccauccagcggcucaaggcggaggcccagauguccauccagcugaucaacaaggccgucaacgcccugaucaacgaccagcucaucaugaagaaccaccuccgcgacaucaugggcauccccuacugcaacuacagcaaguacugguaccugaaccacaccacgaccgggaagaccucccugcccaagugcuggcuggugagcaacggcuccuaccugaacgagacccacuucagcgacgacaucgagcagcaggccgacaacaugaucacggagaugcuccagaaggaguacauggagcggcagggcaagaccccgcuggggcugguggaccuguucgucuucuccaccagcuucuaccucaucuccaucuuccugcaccuggugaagaucccgugaggacuaguaauaaggaaacuguaugaaugucugugggcaggaagugaagagauccuucuguaaagguuuuuggaauuaugucugcugaauaauaaacuuuuuugaaauaauaaaucugguagaaaaaugagaucuaaaaaaaaaaaaaaaaaaaaaaaaaaaaaaaaaaaaaaaaaaaaaaaaaaaaaaaaaaaaaaaaaaaaaaaaaaaaaaaaaaaaaaaaaaaaaaaaaaaa

SEQ ID NO: 42848 - RNA, 1674 nt, Artificial Sequence
  mRNA product Design b-4 (A100) comprising derived and/or modified sequence from MOPV/LASV reassortant(IGS-1;Clade IV)__AFY05576__GPCmut13 (opt1)
aggagagucccgcagucggcguccagcggcucugcuuguucgugugugugucguugcaggccuuauucaagcuuaccaugggccagaucgugaccuucuuccaggaggucccccacgugaucgaggaggugaugaacaucguccugaucgcccucagcgugcuggccgugcugaaggggcucuacaacuucgcgaccugcggccuggucgggcuggugacguuccuccugcugugcggccgcuccugcaccaccagccucuacaaggggguguacgagcugcagacccuggagcucaacauggagacgcugaacaugaccaugccgcuguccugcaccaagaacaacagccaccacuacaucauggucggcaacgagaccggccucgagcugacgcugaccaacaccuccaucaucaaccacaaguucugcaaccucagcgacgcccacaagaagaaccuguacgaccacgcccugauguccaucaucagcaccuuccaccucuccauccccaacuucaaccaguacgaggccaugagcugcgacuucaacgggggcaagaucuccgugcaguacaaccugagccacuccuacgccggggacgcggccaaccacugcggcacgguggccaacgggguccugcagaccuucaugcggauggccuggggcggcagcuacaucgcgcucgacuccgggcgcggcaacugggacugcaucaugaccagcuaccaguaccugaucauccagaacaccacgugggaggaccacugccaguucucccggcccagccccaucggguaccugggccuccugucccagcgcacccgggacaucuacaucagccgccggcugcucggcaccuucaccuggacgcugagcgacuccgagggggaggacaccccgggcggguacugccugacccgcuggaugcucaucgaggccgagcugaagugcuucggcaacaccgccguggccaagugcaacgagaagcacgacgaggaguucugcgacaugcugcggcuguucgacuucaacaagcaggccauccagcgccugaaggcggaggcccagaugagcauccagcugaucaacaaggccgugaacgcccucaucaacgaccagcugaucaugaagaaccaccuccgggacaucauggggauccccuacugcaacuacuccaaguacugguaccucaaccacacgaccaccggccgcaccagccugcccaagugcuggcuggucuccaacggcagcuaccucaacgagacgcacuucuccgacgacaucgagcagcaggccgacaacaugaucaccgagaugcugcagaaggaguacauggagcggcaggggaagacgccccugggccugguggaccucuucguguucagcaccuccuucuaccugaucagcaucuuccugcaccucgucaagaucccgugaggacuaguaauaaggaaacuguaugaaugucugugggcaggaagugaagagauccuucuguaaagguuuuuggaauuaugucugcugaauaauaaacuuuuuugaaauaauaaaucugguagaaaaaugagaucuaaaaaaaaaaaaaaaaaaaaaaaaaaaaaaaaaaaaaaaaaaaaaaaaaaaaaaaaaaaaaaaaaaaaaaaaaaaaaaaaaaaaaaaaaaaaaaaaaaaa

SEQ ID NO: 42849 - RNA, 1674 nt, Artificial Sequence
  mRNA product Design b-4 (A100) comprising derived and/or modified sequence from LASV(LM765-SLE-2012;Clade IV)__AIT17814__GPCmut13 (opt1)
aggagagucccgcagucggcguccagcggcucugcuuguucgugugugugucguugcaggccuuauucaagcuuaccaugggccagaucgugaccuucuuccaggaggucccccacgugaucgaggaggugaugaacaucguccugaucgcccucagcauccuggccgugcugaaggggcucuacaacuucgcgaccugcggccugguggggcuggucacguuccuccugcugugcggccgcuccugcaccaccagccucuacaaggggguguacgagcugcagacccuggagcucaacauggagacgcugaacaugaccaugccgcuguccugcaccaagaacaacagccaccacuacaucauggugggcaacgagaccggccucgagcugacgcugaccaacaccuccaucaucgaccacaaguucugcaaccucagcgacgcccaccggaagaaccuguacgaccacgcccugauguccaucaucagcaccuuccaccucuccauccccaacuucaaccaguacgaggccaugagcugcgacuucaacgggggcaagaucuccguccaguacaaccugagccacuccuacgccaaggacgcggccgaccacugcgggacgguggccaacggcgugcugcagaccuucaugcgcauggccuggggcgggagcuacaucgcgcucgacuccggccgggggcgcugggacugcaucaugaccagcuaccaguaccugaucauccagaacaccacgugggaggaccacugccaguucucccggcccagccccaucggcuaccuggggcuccugucccagcgcacccgggacaucuacaucagccgccggcugcucggcaccuucaccuggacgcugagcgacuccgagggcaaggacacccccgggggcuacugccugacccgcuggaugcucaucgaggccgagcugaagugcuucgggaacaccgccgucgccaagugcaacgagaagcacgacgaggaguucugcgacaugcugcggcuguucgacuucaacaagcaggccauccagcgccugaaggcggaggcccagaugagcauccagcugaucaacaaggccgugaacgcccucaucaacgaccagcugaucaugaagaaccaccuccgggacaucaugggcauccccuacugcaacuacuccaaguacugguaccucaaccacacgaccaccgggaagaccagccugcccaagugcuggcugguguccaacggcagcuaccucaacgagacgcacuucuccgacgacaucgagcagcaggccgacaacaugaucaccgagaugcugcagaaggaguacauggagcgccagggcaagaccccgcuggggcuggucgaccucuucguguucagcaccuccuucuaccugaucagcaucuuccugcaccucgugaagaucccgugaggacuaguaauaaggaaacuguaugaaugucugugggcaggaagugaagagauccuucuguaaagguuuuuggaauuaugucugcugaauaauaaacuuuuuugaaauaauaaaucugguagaaaaaugagaucuaaaaaaaaaaaaaaaaaaaaaaaaaaaaaaaaaaaaaaaaaaaaaaaaaaaaaaaaaaaaaaaaaaaaaaaaaaaaaaaaaaaaaaaaaaaaaaaaaaaa

SEQ ID NO: 42850 - RNA, 1674 nt, Artificial Sequence
  mRNA product Design b-4 (A100) comprising derived and/or modified sequence from LASV(LM776-SLE-2012;Clade IV)__AIT17824__GPCmut13 (opt1)
aggagagucccgcagucggcguccagcggcucugcuuguucgugugugugucguugcaggccuuauucaagcuuaccaugggccagaucgugaccuucuuccaggaggucccccacgugaucgaggaggugaugaacaucguccugaucgcccucagcauccuggccgugcugaaggggcucuacaacuucgcgaccugcggccugguggggcuggucacguuccuccugcugugcggccgcuccugcaccaccagcguguacaaggggguguacgagcuccagacccuggagcugaacauggagacgcucaacaugaccaugccgcuguccugcaccaagaacaacagccaccacuacaucauggucggcaacgagaccggccuggagcucacgcugaccaacaccuccaucaucaaccacaaguucugcaaccugagcgacgcccacaagaagaaccucuacgaccacgcccugauguccaucaucagcaccuuccaccuguccauccccaacuucaaccaguacgaggccaugagcugcgacuucaacgggggcaagaucuccgugcaguacaaccucagccacuccuacgccggggacgcggccaaccacugcggcacgguggccaacgggguccugcagaccuucaugcggauggccuggggcggcagcuacaucgcgcuggacuccgggcacggcaagugggacugcaucaugaccagcuaccaguaccucaucauccagaacaccacgugggaggaccacugccaguucucccgccccagccccaucggguaccugggccugcucucccagcggacccgcgacaucuacaucagccggcgccugcugggcaccuucaccuggacgcucagcgacuccgaggggaaggacaccccgggcggguacugccugacccgguggaugcugaucgaggccgagcucaagugcuucggcaacaccgccguggccaagugcaacgagaagcacgacgaggaguucugcgacaugcugcgccuguucgacuucaacaagcaggccauccagcggcucaaggcggaggcccagaugagcauccagcugaucaacaaggccgugaacgcccugaucaacgaccagcucaucaugaagaaccaccuccgcgacaucauggggauccccuacugcaacuacuccaaguacugguaccugaaccacacgaccaccggcaagaccagccugcccaagugcuggcuggucuccaacggcagcuaccugaacgagacgcacuucuccgacgacaucgagcagcaggccgacaacaugaucaccgagaugcuccagaaggaguacauggagcggcaggggaagacgccccugggccugguggaccuguucguguucagcaccuccuucuaccucaucagcaucuuccugcaccuggucaagaucccgugaggacuaguaauaaggaaacuguaugaaugucugugggcaggaagugaagagauccuucuguaaagguuuuuggaauuaugucugcugaauaauaaacuuuuuugaaauaauaaaucugguagaaaaaugagaucuaaaaaaaaaaaaaaaaaaaaaaaaaaaaaaaaaaaaaaaaaaaaaaaaaaaaaaaaaaaaaaaaaaaaaaaaaaaaaaaaaaaaaaaaaaaaaaaaaaaa

SEQ ID NO: 42851 - RNA, 1674 nt, Artificial Sequence
  mRNA product Design b-4 (A100) comprising derived and/or modified sequence from LASV(Mad39;Clade IV)__ANH09722__GPCmut13 (opt1)
aggagagucccgcagucggcguccagcggcucugcuuguucgugugugugucguugcaggccuuauucaagcuuaccaugggccagaucgugaccuucuuccaggaggucccccacgugaucgaggaggugaugaacaucguccugaucgcccucagcauccuggccgugcugaaggggcucuacaacguggcgaccugcggccugaucgggcuggucacguuccuccugcugugcggccgcuccugcaccaccacccucuacaaggggguguacgagcugcaggcccuggagcucaacauggagacgcugaacaugaccaugccgcugagcugcaccaagaacaacucccaccacuacauccgggugggcaacgagaccggccucgagcugacgcugaccaacaccagccucaucaaccacaaguucugcaaccuguccgacgcccacaagaagaaccuguacgaccacgcccucaugagcaucaucuccaccuuccaccugagcauccccaacuucaaccaguacgaggccauguccugcgacuucaacgacgggaagaucagcguccaguacaaccugucccacacguacgcgggcgacaccgccaaccacugcgggaccguggccaacggcgugcuccagaccuucaugcgcauggccuggggcgggagcuacaucgcgcuggacuccggccgcgggggcugggacugcaucaugacgagcuaccaguaccugaucauccagaacaccaccugggaggaccacugccaguucucccggcccagccccaucggguaccucggccugcugucccagcggacccgcgacaucuacaucagccggcgccuccugggcacguucaccuggacccuguccgacagcgaggggaaggacaccccgggcggguacugccucacgcgguggaugcugaucgaggccgagcugaagugcuucggcaacaccgccgucgccaagugcaacgagaagcacgacgaggaguucugcgacaugcuccgccuguucgacuucaacaagcaggccauccagcggcugaaggcggaggcccagaugagcauccagcucaucaacaaggccgugaacgcccugaucaacgaccagcugaucaugaagaaccaccuccgcgacaucauggggauccccuacugcaacuacuccaaguacugguaccugaaccacaccgugaccggcaagacgagccugcccaagugcuggcucgucuccaacggcagcuaccugaacgagacccacuucuccgacgacaucgagcagcaggccgacaacaugaucaccgagaugcugcagaaggaguacauggagcggcaggggaagacgccccugggccucguggaccuguucguguucagcaccuccuucuaccugaucagcaucuuccuccaccuggucaagaucccgugaggacuaguaauaaggaaacuguaugaaugucugugggcaggaagugaagagauccuucuguaaagguuuuuggaauuaugucugcugaauaauaaacuuuuuugaaauaauaaaucugguagaaaaaugagaucuaaaaaaaaaaaaaaaaaaaaaaaaaaaaaaaaaaaaaaaaaaaaaaaaaaaaaaaaaaaaaaaaaaaaaaaaaaaaaaaaaaaaaaaaaaaaaaaaaaaa

SEQ ID NO: 42852 - RNA, 1674 nt, Artificial Sequence
  mRNA product Design b-4 (A100) comprising derived and/or modified sequence from LASV(Z0947-SLE-2011;Clade IV)__AIT17840__GPCmut13 (opt1)
aggagagucccgcagucggcguccagcggcucugcuuguucgugugugugucguugcaggccuuauucaagcuuaccaugggccagaucgugaccuucuuccaggaggucccccacgugaucgaggaggugaugaacaucguccugaucgcccucagcauccuggccgugcugaaggggcucuacaacuucgcgaccugcggccugguggggcuggucacguuccuccugcugugcggccgcuccugcaccaucagccucuacaaggggguguacgagcugcagacccuggagcucaacauggagacccugaacaugacgaugccgcuguccugcaccaagaacaacagccaccacuacaucauggugggcaacgagaccggccucgagcugacccugacgaacaccuccaucaucaaccacaaguucugcaaccucagcgacgcccacaagaagaaccuguacgaccacgcccugauguccaucaucagcaccuuccaccucuccauccccaacuucaaccaguacgaggccaugagcugcgacuucaacgggggcaagaucuccguccaguacaaccugagccacuccuacgccggggacgcggccaaccacugcggcaccguggccaacggggugcugcagacguucaugcggauggccuggggcggcagcuacaucgcgcucgacuccgggcgcgaccggugggacugcaucaugaccagcuaccaguaccugaucauccagaacaccaccugggaggaccacugccaguucucccgccccagccccaucggcuaccuggggcuccugucccagcggacgcgcgacaucuacaucagccggcgccugcucggcaccuucaccuggacccugagcgacuccgagggcaaggacacgcccgggggcuacugccugacccgguggaugcucaucgaggccgagcugaagugcuucgggaacaccgccgucgccaagugcaacgagaagcacgacgaggaguucugcgacaugcugcgccucuucgacuucaacaagcaggccauccagcggcugaaggcggaggcccagaugagcauccagcugaucaacaaggccgugaacgcccucaucaacgaccagcugaucaugaagaaccaccuccgcgacaucaugggcauccccuacugcaacuacuccaaguacugguaccugaaccacaccacgaccgggaagaccagccugcccaagugcuggcugguguccaacggcagcuaccucaacgagacccacuucuccgacgacaucgagcagcaggccgacaacaugaucacggagaugcugcagaaggaguacauggagcggcagggcaagaccccgcuggggcuggucgaccucuucguguucagcaccuccuucuaccugaucagcaucuuccugcaccucgugaagaucccgugaggacuaguaauaaggaaacuguaugaaugucugugggcaggaagugaagagauccuucuguaaagguuuuuggaauuaugucugcugaauaauaaacuuuuuugaaauaauaaaucugguagaaaaaugagaucuaaaaaaaaaaaaaaaaaaaaaaaaaaaaaaaaaaaaaaaaaaaaaaaaaaaaaaaaaaaaaaaaaaaaaaaaaaaaaaaaaaaaaaaaaaaaaaaaaaaa

SEQ ID NO: 42853 - RNA, 1674 nt, Artificial Sequence
  mRNA product Design b-4 (A100) comprising derived and/or modified sequence from LASV(Josiah;Clade IV)__NP_694870__GPCmut13 (opt4)
aggagagucccgcagucggcguccagcggcucugcuuguucgugugugugucguugcaggccuuauucaagcuuaccaugggccagaucgugaccuucuuccaggaggugccccacgugaucgaggaggugaugaacaucgugcugaucgcccugagcgugcuggccgugcugaagggccuguacaacuucgccaccugcggccuggugggccuggugaccuuccugcugcugugcggcagaagcugcaccaccagccuguacaagggcguguacgagcugcagacccuggagcugaacauggagacccugaacaugaccaugccccugagcugcaccaagaacaacagccaccacuacaucauggugggcaacgagaccggccuggagcugacccugaccaacaccagcaucaucaaccacaaguucugcaaccugagcgacgcccacaagaagaaccuguacgaccacgcccugaugagcaucaucagcaccuuccaccugagcauccccaacuucaaccaguacgaggccaugagcugcgacuucaacggcggcaagaucagcgugcaguacaaccugagccacagcuacgccggcgacgccgccaaccacugcggcaccguggccaacggcgugcugcagaccuucaugagaauggccuggggcggcagcuacaucgcccuggacagcggcagaggcaacugggacugcaucaugaccagcuaccaguaccugaucauccagaacaccaccugggaggaccacugccaguucagcagacccagccccaucggcuaccugggccugcugagccagagaaccagagacaucuacaucagcagaagacugcugggcaccuucaccuggacccugagcgacagcgagggcaaggacacccccggcggcuacugccugaccagauggaugcugaucgaggccgagcugaagugcuucggcaacaccgccguggccaagugcaacgagaagcacgacgaggaguucugcgacaugcugagacuguucgacuucaacaagcaggccauccagagacugaaggccgaggcccagaugagcauccagcugaucaacaaggccgugaacgcccugaucaacgaccagcugaucaugaagaaccaccugagagacaucaugggcauccccuacugcaacuacagcaaguacugguaccugaaccacaccaccaccggcagaaccagccugcccaagugcuggcuggugagcaacggcagcuaccugaacgagacccacuucagcgacgacaucgagcagcaggccgacaacaugaucaccgagaugcugcagaaggaguacauggagagacagggcaagaccccccugggccugguggaccuguucguguucagcaccagcuucuaccugaucagcaucuuccugcaccuggugaagauccccugaggacuaguaauaaggaaacuguaugaaugucugugggcaggaagugaagagauccuucuguaaagguuuuuggaauuaugucugcugaauaauaaacuuuuuugaaauaauaaaucugguagaaaaaugagaucuaaaaaaaaaaaaaaaaaaaaaaaaaaaaaaaaaaaaaaaaaaaaaaaaaaaaaaaaaaaaaaaaaaaaaaaaaaaaaaaaaaaaaaaaaaaaaaaaaaaa

SEQ ID NO: 42854 - RNA, 1671 nt, Artificial Sequence
  mRNA product Design b-4 (A100) comprising derived and/or modified sequence from LASV(LP;Clade I)__AAF86701__GPCmut13 (opt4)
aggagagucccgcagucggcguccagcggcucugcuuguucgugugugugucguugcaggccuuauucaagcuuaccaugggccagaucaucaccuucuuccaggaggugccccacgugaucgaggaggugaugaacaucgugcugaucgcccugagccugcuggccauccugaagggccuguacaacaucgccaccugcggcaucaucggccugguggccuuccuguuccugugcggcaagagcugcagccugacccugaagggcggcuacgagcugcagacccuggagcugaacauggagacccugaacaugaccaugccccugagcugcaccaagaacagcagccaccacuacaucagagugggcaacgagaccggccuggagcugacccugaccaacaccagcaucaucaaccacaaguucugcaaccugagcgacgcccacaagaagaaccuguacgaccacgcccugaugagcaucaucagcaccuuccaccugagcauccccaacuucaaccaguacgaggccaugagcugcgacuucaacggcggcaagaucagcgugcaguacaaccugagccacagcuacgccggcgacgccgccgagcacugcggcaccguggccaacggcgugcugcagaccuucaugagaauggccuggggcggcagauacaucgcccuggacagcggcaagggcaacugggacugcaucaugaccagcuaccaguaccugaucauccagaacaccaccugggaggaccacugccaguucagcagacccagccccaucggcuaccugggccugcugagccagagaaccagagacaucuacaucagcagaagacugcugggcaccuucaccuggacccugagcgacagcgagggcaacgagacccccggcggcuacugccugaccagauggaugcugaucgaggccgagcugaagugcuucggcaacaccgccguggccaagugcaacgagaagcacgacgaggaguucugcgacaugcugagacuguucgacuucaacaagcaggccaucagaagacugaaggccgaggcccagaugagcauccagcugaucaacaaggccgugaacgcccugaucaacgaccagcugaucaugaagaaccaccugagagacaucaugggcauccccuacugcaacuacagcaaguacugguaccugaaccacaccagcagcggcagaaccagccugcccaagugcuggcugaucagcaacggcagcuaccugaacgagacccaguucagcgacgacaucgagcagcaggccgacaacaugaucaccgagaugcugcagaaggaguacaucgagagacagggcaagaccccccugggccugguggacaucuucaucuucagcaccagcuucuaccugaucagcaucuuccugcaccugaucaagauccccugaggacuaguaauaaggaaacuguaugaaugucugugggcaggaagugaagagauccuucuguaaagguuuuuggaauuaugucugcugaauaauaaacuuuuuugaaauaauaaaucugguagaaaaaugagaucuaaaaaaaaaaaaaaaaaaaaaaaaaaaaaaaaaaaaaaaaaaaaaaaaaaaaaaaaaaaaaaaaaaaaaaaaaaaaaaaaaaaaaaaaaaaaaaaaaaaa

SEQ ID NO: 42855 - RNA, 1671 nt, Artificial Sequence
  mRNA product Design b-4 (A100) comprising derived and/or modified sequence from LASV(803213;Clade II)__AAF86703__GPCmut13 (opt4)
aggagagucccgcagucggcguccagcggcucugcuuguucgugugugugucguugcaggccuuauucaagcuuaccaugggccagaucaucaccuucuuccaggaggugccccacgugaucgaggaggugaugaacaucgugcugaucgcccugagccugcuggccauccugaagggcaucuacaacguggccaccugcggccuguucggccugaucagcuuccugcugcugugcggcagaagcugcagcgugaccuacaagggcguguacgagcugcagacccuggagcugaacauggccaaccugaacaugaccaugccccugagcugcaccaagaacaacagccaccacuacaucauggugggcaacgagaccggccuggagcugacccugaccaacaccagcaucaucaaccacaaguucugcaaccugagcgacgcccacaagaagaaccuguacgaccacgcccugaugagcaucaucagcaccuuccaccugagcauccccaacuucaaccaguacgaggccaugagcugcgacuucaacggcggcaagaucagcgugcaguacaaccugagccacagcuucgccguggacgccgccaaccacugcggcaccaucgccaacggcgugcugcagaccuucaugagaauggccuggggcggcagcuacaucgcccuggacagcggcaagggcaacugggacugcaucaugaccagcuaccaguaccugaucauccagaacaccaccugggaggaccacugccaguucagcagacccagccccaucggcuaccugggccugcugagccagagaaccagagacaucuacaucagcagaagacugcugggcaccuucaccuggacccugagcgacagcgagggcaacgaggcccccggcggcuacugccugaccagauggaugcugaucgaggccgagcugaagugcuucggcaacaccgccguggccaagugcaacgagaagcacgacgaggaguucugcgacaugcugagacuguucgacuucaacaagcaggccaucaagagacugaagaccgaggcccagaugagcauccagcugaucaacaaggccgugaacgcccugaucaacgaccagcugaucaugaagaaccaccugagagacaucaugggcauccccuacugcaacuacagcagauacugguaccugaaccacaccgugaccggcaagaccagccugcccagaugcuggcuggugagcaacggcagcuaccugaacgagacccacuucagcgacgacaucgagcagcaggccgacaacaugaucaccgagaugcugcagaaggaguacauggacagacagggcaagaccccccugggccugguggaccuguucguguucagcaccagcuucuaccugaucagcaucuuccugcaccuggugaagauccccugaggacuaguaauaaggaaacuguaugaaugucugugggcaggaagugaagagauccuucuguaaagguuuuuggaauuaugucugcugaauaauaaacuuuuuugaaauaauaaaucugguagaaaaaugagaucuaaaaaaaaaaaaaaaaaaaaaaaaaaaaaaaaaaaaaaaaaaaaaaaaaaaaaaaaaaaaaaaaaaaaaaaaaaaaaaaaaaaaaaaaaaaaaaaaaaaa

SEQ ID NO: 42856 - RNA, 1671 nt, Artificial Sequence
  mRNA product Design b-4 (A100) comprising derived and/or modified sequence from LASV(GA391;Clade III)__CAA36645__GPCmut13 (opt4)
aggagagucccgcagucggcguccagcggcucugcuuguucgugugugugucguugcaggccuuauucaagcuuaccaugggccagaucgugaccuucuuccaggaggugccccacgugaucgaggaggugaugaacaucgugcugaucgcccugagcauccuggccauccugaagggccuguacaacguggccaccugcggccugaucggccuggugaccuuccugcugcugagcggcagaagcugcagccugaucuacaagggcaccuacgagcugcagacccuggagcugaacauggagacccugaacaugaccaugccccugagcugcaccaagaacaacagccaccacuacaucagagugggcaacgagaccggccuggagcugacccugaccaacaccagcauccugaaccacaaguucugcaaccugagcgacgcccacaagagaaaccuguacgaccacagccugaugagcaucaucagcaccuuccaccugagcauccccaacuucaaccaguacgaggccaugagcugcgacuucaacggcggcaagaucaccgugcaguacaaccugagccacagcuucgccguggacgccgccggccacugcggcacccuggccaacggcgugcugcagaccuucaugagaauggccuggggcggcagcuacaucgcccuggacagcggcagaggcaacugggacugcaucaugaccagcuaccaguaccugaucauccagaacaccaccugggacgaccacugccaguucagcagacccagccccaucggcuaccugggccugcugagccagagaaccagagacaucuacaucagcagaagacugcugggcaccuucaccuggacccugagcgacagcgagggcaacgagacccccggcggcuacugccugaccagauggaugcugaucgaggccgagcugaagugcuucggcaacaccgccguggccaagugcaacgagaagcacgacgaggaguucugcgacaugcugagacuguucgacuucaacaagcaggccaucagaagacugaagaccgaggcccagaugagcauccagcugaucaacaaggccgugaacgcccugaucaacgaccagcugaucaugaagaaccaccugagagacaucaugggcauccccuacugcaacuacagcagauacugguaccugaaccacaccagcaccggcaagaccagccugcccagaugcuggcugaucagcaacggcagcuaccugaacgagaccaaguucagcgacgacaucgagcagcaggccgacaacaugaucaccgagaugcugcagaaggaguacaucgacagacagggcaagaccccccugggccugguggaccuguucguguucagcaccagcuucuaccugaucagcaucuuccugcaccuggugaagauccccugaggacuaguaauaaggaaacuguaugaaugucugugggcaggaagugaagagauccuucuguaaagguuuuuggaauuaugucugcugaauaauaaacuuuuuugaaauaauaaaucugguagaaaaaugagaucuaaaaaaaaaaaaaaaaaaaaaaaaaaaaaaaaaaaaaaaaaaaaaaaaaaaaaaaaaaaaaaaaaaaaaaaaaaaaaaaaaaaaaaaaaaaaaaaaaaaa

SEQ ID NO: 42857 - RNA, 1674 nt, Artificial Sequence
  mRNA product Design b-4 (A100) comprising derived and/or modified sequence from LASV(AV;Clade V)__CCA30314__GPCmut13 (opt4)
aggagagucccgcagucggcguccagcggcucugcuuguucgugugugugucguugcaggccuuauucaagcuuaccaugggccagaucgugaccuucuuccaggaggugccccacgugaucgaggaggugaugaacaucgugcugaucgcccugagcauccuggccgugcugaagggccuguacaacaucgccaccugcggccugaucggccugaucaccuuccugcugcugugcggcagaagcugcagcagcaaccuguacaagggcguguacgagcugcagagccuggaccugaacauggagacccugaacaugaccaugccccugagcugcaccaagaacaacagccaccacuacaucagagugggcaacgacaccggccuggagcugacccugaccaacaccagcauccugaaccacaaguucugcaaccugagcgacgcccacaagaaggaccuguacgaccacgcccugaugagcaucaucagcaccuuccaccugagcauccccaacuucaaccaguacgaggccaugagcugcgacuucaacggcggcaagaucagcgugcaguacaaccugagccacagcuacgccaucgacgccgccaaccacugcggcaccguggccaacggcauccugcagaccuucaugagaauggccuggggcggcagcuacaucgcccuggacagcggcagaggcaacugggacugcaucaugaccagcuaccaguaccugaucauccagaacaccaccugggagaaccacugccaguucagcagacccagccccaucggcuaccugggccugcugagccagagaaccagagacaucuacaucagcagaagacugcugggcaccuucaccuggacccugagcgacagcgagggcaacgccacccccggcggcuacugccugaccagauggaugcugaucgaggccgagcugaagugcuucggcaacaccgccguggccaagugcaacgagaagcacgacgaggaguucugcgacaugcugagacuguucgacuucaacaagcaggccaucagcagacugaagagcgaggcccagaugagcauccagcugaucaacaaggccgugaacgcccugaucaacgaccagcugaucaugaagaaccaccugagagacaucaugggcauccccuacugcaacuacagcaaguacugguaccugaaccacaccaucaccggcaagaccagccugcccaagugcuggcuggugagcaacggcagcuaccugaacgagacccacuucagcgacgacaucgagcagcaggccgacaacaugaucaccgagaugcugcagaaggaguacauggagagacagggcaagaccccccugggccugguggaccuguucguguucagcaccagcuucuaccugaucagcaucuuccugagacuggugaagauccccugaggacuaguaauaaggaaacuguaugaaugucugugggcaggaagugaagagauccuucuguaaagguuuuuggaauuaugucugcugaauaauaaacuuuuuugaaauaauaaaucugguagaaaaaugagaucuaaaaaaaaaaaaaaaaaaaaaaaaaaaaaaaaaaaaaaaaaaaaaaaaaaaaaaaaaaaaaaaaaaaaaaaaaaaaaaaaaaaaaaaaaaaaaaaaaaaa

SEQ ID NO: 42858 - RNA, 1671 nt, Artificial Sequence
  mRNA product Design b-4 (A100) comprising derived and/or modified sequence from LASV(Togo/2016/7082;Clade VI)__AMR44577__GPCmut13 (opt4)
aggagagucccgcagucggcguccagcggcucugcuuguucgugugugugucguugcaggccuuauucaagcuuaccaugggccagaucaucaccuucuuccaggaggugccccacgugaucgaggaggugaugaacaucgugcugaucgcccugagccugcuggccauccugaagggcguguacaacguggccaccugcggcaucaucggccuggugaccuuccuguuccugugcggcagaagcugcagccugaucuacaagggcagcuacgagcugcagacccuggagcugaacauggagacccugaacaugaccaugccccugagcugcaccaagaacagcagccaccacuacaucagagugggcaacgagaccggccuggagcugacccugaccaacaccagcaucaucaaccacaaguucugcaaccugagcgacgcccacaagagaaaccuguacgaccacgcccugaugagcauccugagcaccuuccaccugagcauccccaacuucaaccaguacgaggccaugagcugcgacuucaacggcggcaagaucagcgugcaguacaaccugagccacgccuacgccguggacgccgccgagcacugcggcaccguggccaacggcgugcugcagaccuucaugagaauggccuggggcggcagcuacaucgcccuggacagcggcagaggcaacugggacugcaucaugaccagcuaccaguaccugaucauccagaacaccaccugggaggaccacugccaguucagcagacccagccccaucggcuaccugggccugcugagccagagaaccagagacaucuacaucagcagaagacugcugggcaccuucaccuggacccugagcgacagcgagggcaacgagacccccggcggcuacugccugaccagauggaugcugaucgaggccgagcugaagugcuucggcaacaccgccguggccaagugcaacgagaagcacgacgaggaguucugcgacaugcugagacuguucgacuucaacaagcaggccauccagagacugaagagcgaggcccagaugagcauccagcugaucaacaaggccgugaacgcccugaucaacgaccagcugaucaugaagaaccaccugagagacaugaugggcauccccuacugcaacuacagcaaguacugguaccugaaccacaccagcagcggcagaaccagccugcccaagugcuggcuggugagcaacggcagcuaccugaacgagacccacuucagcgacgacaucgagcagcaggccgacaacaugaucaccgagaugcugcagaaggaguacaucgacagacagggcaagaccccccugggccugguggaccuguucguguucagcaccagcuucuaccugaucagcaucuuccugcaccugaucaagauccccugaggacuaguaauaaggaaacuguaugaaugucugugggcaggaagugaagagauccuucuguaaagguuuuuggaauuaugucugcugaauaauaaacuuuuuugaaauaauaaaucugguagaaaaaugagaucuaaaaaaaaaaaaaaaaaaaaaaaaaaaaaaaaaaaaaaaaaaaaaaaaaaaaaaaaaaaaaaaaaaaaaaaaaaaaaaaaaaaaaaaaaaaaaaaaaaaa

SEQ ID NO: 42859 - RNA, 1671 nt, Artificial Sequence
  mRNA product Design b-4 (A100) comprising derived and/or modified sequence from LASV(KAK-428;Clade n.d. (VII))__ANH09740__GPCmut13 (opt4)
aggagagucccgcagucggcguccagcggcucugcuuguucgugugugugucguugcaggccuuauucaagcuuaccaugggccagaucgugaccuucuuccaggaggugccccacgugaucgaggaggugaugaacaucgugcugaucgcccugagccugcuggccauccugaagggccuguacaacuucgccaccugcggcgugaucggccugaucaccuuccugcugcugugcggcagaagcugcagcgccaccuacaagggccaguacgagcugcagacccuggagcugaacauggagagccugaacaugaccaugccccugagcugcaccaagaacaacagccaccacuacaucagagccggcaacaacaccggccuggagcugacccugaccaacaccagcaucaucagccacaaguucugcaaccugagcgacgcccacaagaagaaccuguacgaccacacccugaugagcaucaucaccaccuuccaccugagcauccccaacuucaaccaguacgaggccaugagcugcgacuucaacggcggcaagaucagcauccaguacaaccugagccacagcuacgccggcgacgccgcccagcacugcggcaccguggccaacggcgugcugcagaccuucaugagaauggccuggggcggcagcuaccuggcccuggacagcggcagaagaggcugggacugcaucaucagcagcuaccaguaccugaucauccagaacaccaccugggacgaccacugccaguucagcagacccagccccaucggcuaccugggcuucgugagccagaagaccagagacaucuacaucagcagaagacugcugggcaccuucaccuggacccugagcgacagcgagggccacgacaugcccggcggcuacugccugaccagauggaugcugaucgaggccgaccugaagugcuucggcaacaccgccguggccaagugcaacgagaagcacgacgaggaguucugcgacauguggagacuguucgacuucaacaagcaggccauccagagacugaaggccgaggcccagaugaacauccagcugaucaacaaggccgugaacgcccugaucaacgaccagcugaugaugaagaaccaccugagagacaucaugggcauccccuacugcaacuacagcaaguucugguaccugaacaacaccaccaccggcagaaccagccugcccagaugcuggcugaucagcaacggcagcuaccugaacgagacccacuucagcgacgacaucgagcagcaggccgacaacaugaucaccgagaugcugcagaaggaguacauggacagacagggcaagaccccccugggccugguggaccuguucguguucagcaccagcuucuaccugaucaccaucuuccugcaccuggugaagauccccugaggacuaguaauaaggaaacuguaugaaugucugugggcaggaagugaagagauccuucuguaaagguuuuuggaauuaugucugcugaauaauaaacuuuuuugaaauaauaaaucugguagaaaaaugagaucuaaaaaaaaaaaaaaaaaaaaaaaaaaaaaaaaaaaaaaaaaaaaaaaaaaaaaaaaaaaaaaaaaaaaaaaaaaaaaaaaaaaaaaaaaaaaaaaaaaaa

SEQ ID NO: 42860 - RNA, 1671 nt, Artificial Sequence; identical to SEQ ID NO: 42854
  mRNA product Design b-4 (A100) comprising derived and/or modified sequence from LASV(Pinneo-NIG-1969;Clade I)__AIT17836__GPCmut13 (opt4)

SEQ ID NO: 42861 - RNA, 1671 nt, Artificial Sequence
  mRNA product Design b-4 (A100) comprising derived and/or modified sequence from LASV(ISTH0009-NIG-2011;Clade II)__AIT17404__GPCmut13 (opt4)
aggagagucccgcagucggcguccagcggcucugcuuguucgugugugugucguugcaggccuuauucaagcuuaccaugggccagaucaucaccuucuuccaggaggugccccacgugaucgaggaggugaugaacaucgugcugaucgcccugagccugcuggccauccugaagggcaucuacaacguggccaccugcggccuguucggccuggugagcuuccugcugcugugcggcagaagcugcagcaccaccuacaagggcguguacgagcugcagacccuggagcuggacauggccagccugaacaugaccaugccccugagcugcaccaagaacaacagccaccacuacaucauggugggcaacgagaccggccuggagcugacccugaccaacaccagcaucaucaaccacaaguucugcaaccugagcgacgcccacaagaagaaccuguacgaccacgcccugaugagcaucaucagcaccuuccaccugagcauccccaacuucaaccaguacgaggccaugagcugcgacuucaacggcggcaagaucagcgugcaguacaaccugagccacgccuacgccguggacgccgccaaccacugcggcaccaucgccaacggcgugcugcagaccuucaugagaauggccuggggcggcagcuacaucgcccuggacagcggcaagggcagcugggacugcaucaugaccagcuaccaguaccugaucauccagaacaccaccugggaggaccacugccaguucagcagacccagccccaucggcuaccugggccugcugagccagagaaccagagacaucuacaucagcagaagacugcugggcaccuucaccuggacccugagcgacagcgagggcaacgagacccccggcggcuacugccugaccagauggaugcugaucgaggccgagcugaagugcuucggcaacaccgccguggccaagugcaacgagaagcacgacgaggaguucugcgacaugcugagacuguucgacuucaacaagcaggccaucagaagacugaagaccgaggcccagaugagcauccagcugaucaacaaggccgugaacgcccugaucaacgaccagcugaucaugaagaaccaccugagagacaucaugggcauccccuacugcaacuacagcaaguacugguaccugaaccacaccgugaccggcaagaccagccugcccagaugcuggcuggugagcaacggcagcuaccugaacgagacccacuucagcgacgacaucgagcagcaggccgacaacaugaucaccgagcugcugcagaaggaguacauggacagacagggcaagaccccccugggccugguggaccuguucguguucagcaccagcuucuaccugaucagcaucuuccugcaccugaucaagauccccugaggacuaguaauaaggaaacuguaugaaugucugugggcaggaagugaagagauccuucuguaaagguuuuuggaauuaugucugcugaauaauaaacuuuuuugaaauaauaaaucugguagaaaaaugagaucuaaaaaaaaaaaaaaaaaaaaaaaaaaaaaaaaaaaaaaaaaaaaaaaaaaaaaaaaaaaaaaaaaaaaaaaaaaaaaaaaaaaaaaaaaaaaaaaaaaaa

SEQ ID NO: 42862 - RNA, 1671 nt, Artificial Sequence
  mRNA product Design b-4 (A100) comprising derived and/or modified sequence from LASV(ISTH2010-NIG-2012;Clade II)__AIT17482__GPCmut13 (opt4)
aggagagucccgcagucggcguccagcggcucugcuuguucgugugugugucguugcaggccuuauucaagcuuaccaugggccagaucaucaccuucuuccaggaggugccccacgugaucgaggaggugaugaacaucgugcugaucgcccugagccugcuggccauccugaagggcaucuacaacguggccaccugcggccuguucggccuggugagcuuccugcugcugugcggcagaagcugcagcaccaccuacaagggcguguacgagcugcagacccuggagcuggacauggccagccugaacaugaccaugccccugagcugcaccaagaacaacagccaccacuacaucauggugggcaacgagaccggccuggagcugacccugaccaacaccagcaucaucaaccacaaguucugcaaccugagcgacgcccacaagaagaaccuguacgaccacgcccugaugagcaucaucagcaccuuccaccugagcauccccaacuucaaccaguacgaggccaugagcugcgacuucaacggcggcaagaucagcgugcaguacaaccugagccacgccuacgccguggacgccgccaaccacugcggcaccaucgccaacggcgugcugcagaccuucaugagaauggccuggggcggcagcuacaucgcccuggacagcggcaagggcagcugggacugcaucaugaccagcuaccaguaccugaucauccagaacaucaccugggaggaccacugccaguucagcagacccagccccaucggcuaccugggccugcugagccagagaaccagagacaucuacaucagcagaagacugcugggcaccuucaccuggacccugagcgacagcgagggcaacgagacccccggcggcuacugccugaccagauggaugcugaucgaggccgagcugaagugcuucggcaacaccgccguggccaagugcaacgagaagcacgacgaggaguucugcgacaugcugagacuguucgacuucaacaagcaggccaucagaagacugaagaccgaggcccagaugagcauccagcugaucaacaaggccgugaacgcccugaucaacgaccagcugaucaugaagaaccaccugagagacaucaugggcauccccuacugcaacuacagcaaguacugguaccugaaccacaccgugaccggcaagaccagccugcccagaugcuggcuggugagcaacggcagcuaccugaacgagacccacuucagcgacgacaucgagcagcaggccgacaacaugaucaccgagcugcugcagaaggaguacaucgacagacagggcaagaccccccugggccugguggaccuguucguguucagcaccagcuucuaccugaucagcaucuuccugcaccuggugaagauccccugaggacuaguaauaaggaaacuguaugaaugucugugggcaggaagugaagagauccuucuguaaagguuuuuggaauuaugucugcugaauaauaaacuuuuuugaaauaauaaaucugguagaaaaaugagaucuaaaaaaaaaaaaaaaaaaaaaaaaaaaaaaaaaaaaaaaaaaaaaaaaaaaaaaaaaaaaaaaaaaaaaaaaaaaaaaaaaaaaaaaaaaaaaaaaaaaa

SEQ ID NO: 42863 - RNA, 1671 nt, Artificial Sequence
  mRNA product Design b-4 (A100) comprising derived and/or modified sequence from LASV(Lassa virus/H.sapiens-wt/NGA/2015/ISTH_0543;Clade II)__AVO03639__GPCmut13 (opt4)
aggagagucccgcagucggcguccagcggcucugcuuguucgugugugugucguugcaggccuuauucaagcuuaccaugggccagaucaucaccuucuuccaggaggugccccacgugaucgaggaggugaugaacaucgugcugaucgcccugagccugcuggccauccugaagggcaucuacaacguggccaccugcggccuguucggccuggugagcuuccugcugcugugcggcagaagcugcagcaccaccuacaagggcguguacgagcugcagacccuggagcuggacauggccaaccugaacaugaccaugccccugagcugcaccaagaacaacagccaccacuacaucauggugggcaacgagaccggccuggagcugacccugaccaacaccagcaucaucaaccacaaguucugcaaccugagcgacgcccacaagaagaaccuguacgaccacgcccugaugagcaucaucagcaccuuccaccugagcauccccaacuucaaccaguacgaggccaugagcugcgacuucaacggcggcaagaucagcgugcaguacaaccugagccacaccuacgccguggacgccgccaaccacugcggcaccaucgccaacggcgugcugcagaccuucaugagaauggccuggggcggcagcuacaucgcccuggacagcggcaagggcagcugggacugcaucaugaccagcuaccaguaccuggugauccagaacaccaccugggaggaccacugccaguucagcagacccagccccaucggcuaccugggccugcugagccagagaaccagagacaucuacaucagcagaagacugcugggcaccuucaccuggacccugagcgacagcgagggcaacgagacccccggcggcuacugccugaccagauggaugcugaucgaggccgagcugaagugcuucggcaacaccgccguggccaagugcaacgagaagcacgacgaggaguucugcgacaugcugagacuguucgacuucaacaagcaggccaucagaagacugaagaccgaggcccagaugagcauccagcugaucaacaaggccgugaacgcccugaucaacgaccagcugaucaugaagaaccaccugagagacaucaugggcauccccuacugcaacuacagcaaguacugguaccugaaccacaccgugaccggcaagaccagccugcccagaugcuggcuggugagcaacggcagcuaccugaacgagacccacuucagcgacgacaucgagcagcaggccgacaacaugaucaccgagcugcugcagaaggaguacaucgacagacagggcaagaccccccugggccugguggaccuguucguguucagcaccagcuucuaccugaucagcaucuuccugcaccuggugaagauccccugaggacuaguaauaaggaaacuguaugaaugucugugggcaggaagugaagagauccuucuguaaagguuuuuggaauuaugucugcugaauaauaaacuuuuuugaaauaauaaaucugguagaaaaaugagaucuaaaaaaaaaaaaaaaaaaaaaaaaaaaaaaaaaaaaaaaaaaaaaaaaaaaaaaaaaaaaaaaaaaaaaaaaaaaaaaaaaaaaaaaaaaaaaaaaaaaa

SEQ ID NO: 42864 - RNA, 1671 nt, Artificial Sequence
  mRNA product Design b-4 (A100) comprising derived and/or modified sequence from LASV(Lassa virus/H.sapiens-wt/NGA/2016/ISTH_0009;Clade II)__AVO03571__GPCmut13 (opt4)
aggagagucccgcagucggcguccagcggcucugcuuguucgugugugugucguugcaggccuuauucaagcuuaccaugggccagaucaucaccuucuuccaggaggugccccacgugaucgaggaggugaugaacaucgugcugaucgcccugagccugcuggccauccugaagggcaucuacaacguggccaccugcggccugcugggccuggugagcuuccugcugcugugcggcagaagcugcagcaccaccuacaagggcguguacgagcugcagacccuggagcuggacauggccagccugaacaugaccaugccccugagcugcaccaagaacaacagccaccacuacaucauggugggcaacgagaccggccuggagcugacccugaccaacaccagcaucaucaaccacaaguucugcaaccugagcgacgcccacaagaagaaccuguacgaccacgcccugaugagcaucaucagcaccuuccaccugagcauccccaacuucaaccaguacgaggccaugagcugcgacuucaacggcggcagaaucagcgugcaguacaaccugagccacagcuacgccguggacgccgccaaccacugcggcaccaucgccaacggcgugcugcagaccuucaugagaauggccuggggcggcagcuacaucgcccuggacagcggcaagggcagcugggacugcaucaugaccagcuaccaguaccugaucauccagaacaccaccugggaggaccacugccaguucagcagacccagccccaucggcuaccugggccugcugagccagagaaccagagacaucuacaucagcagaagacugcugggcaccuucaccuggacccugagcgacagcgagggcaacgagacccccggcggcuacugccugaccagauggaugcugaucgaggccgagcugaagugcuucggcaacaccgccguggccaagugcaacgagaagcacgacgaggaguucugcgacaugcugagacuguucgacuucaacaagcaggccaucagaagacugaagaccgaggcccagaugagcauccagcugaucaacaaggccgugaacgcccugaucaacgaccagcugaucaugaagaaccaccugagagacaucaugggcauccccuacugcaacuacagcaaguacugguaccugaaccacaccgugaccggcaagaccagccugcccagaugcuggcuggugagcaacggcagcuaccugaacgagacccacuucagcgacgacaucgagcagcaggccgacaacaugaucaccgagcugcugcagaaggaguacaucgacagacagggcaagaccccccugggccugguggaccuguucguguucagcaccagcuucuaccugaucagcaucuuccugcaccuggugaagauccccugaggacuaguaauaaggaaacuguaugaaugucugugggcaggaagugaagagauccuucuguaaagguuuuuggaauuaugucugcugaauaauaaacuuuuuugaaauaauaaaucugguagaaaaaugagaucuaaaaaaaaaaaaaaaaaaaaaaaaaaaaaaaaaaaaaaaaaaaaaaaaaaaaaaaaaaaaaaaaaaaaaaaaaaaaaaaaaaaaaaaaaaaaaaaaaaaa

SEQ ID NO: 42865 - RNA, 1671 nt, Artificial Sequence
  mRNA product Design b-4 (A100) comprising derived and/or modified sequence from LASV(Lassa virus/H.sapiens-wt/NGA/2016/ISTH_0017;Clade II)__AVO03567__GPCmut13 (opt4)
aggagagucccgcagucggcguccagcggcucugcuuguucgugugugugucguugcaggccuuauucaagcuuaccaugggccagaucaucaccuucuuccaggaggugccccacgugaucgaggaggugaugaacaucgugcugaucgcccugagccugcuggccauccugaagggcaucuacaacguggccaccugcggccuguucggccuggugagcuuccugcugcugugcggcagaagcugcagcaccaccuacaagggcguguacgagcugcagacccuggagcuggacauggccagccugaacaugaccaugccccugagcugcaccaagaacaacagccaccacuacaucauggugggcaacgagaccggccuggagcugacccugaccaacaccagcaucaucaaccacaaguucugcaaccugagcgacgcccacaagaagaaccuguacgaccacgcccugaugagcaucaucagcaccuuccaccugagcauccccaacuucaaccaguacgaggccaugagcugcgacuucaacggcggcaagaucagcgugcaguacaaccugagccacaccuacgccaucgacgccgccaaccacugcggcaccaucgccaacggcgugcugcagaccuucaugagaauggccuggggcggcagcuacaucgcccuggacagcggcaagggcagcugggacugcaucaugaccagcuaccaguaccugaucauccagaacaccaccugggaggaccacugccaguucagcagacccagccccaucggcuaccugggccugcugagccagagaaccagagacaucuacaucagcagaagacugcugggcaccuucaccuggacccugagcgacagcgagggcaacgagacccccggcggcuacugccugaccagauggaugcugaucgaggccgagcugaagugcuucggcaacaccgccguggccaagugcaacgagaagcacgacgaggaguucugcgacaugcugagacuguucgacuucaacaagcaggccaucagaagacugaagaccgaggcccagaugagcauccagcugaucaacaaggccgugaacgcccugaucaacgaccagcugaucaugaagaaccaccugagagacaucaugggcauccccuacugcaacuacagcaaguacugguaccugaaccacaccgugaccggcaagaccagccugcccagaugcuggcuggugagcaacggcagcuaccugaacgagacccacuucagcgacgacaucgagcagcaggccgacaacaugaucaccgagcugcugcagaaggaguacauggacagacagggcaagaccccccugggccugguggaccuguucguguucagcaccagcuucuaccugaucagcaucuuccugcaccuggugagaauccccugaggacuaguaauaaggaaacuguaugaaugucugugggcaggaagugaagagauccuucuguaaagguuuuuggaauuaugucugcugaauaauaaacuuuuuugaaauaauaaaucugguagaaaaaugagaucuaaaaaaaaaaaaaaaaaaaaaaaaaaaaaaaaaaaaaaaaaaaaaaaaaaaaaaaaaaaaaaaaaaaaaaaaaaaaaaaaaaaaaaaaaaaaaaaaaaaa

SEQ ID NO: 42866 - RNA, 1671 nt, Artificial Sequence
  mRNA product Design b-4 (A100) comprising derived and/or modified sequence from LASV(Lassa virus/H.sapiens-wt/NGA/2018/ISTH_0959;Clade II)__AVV65099__GPCmut13 (opt4)
aggagagucccgcagucggcguccagcggcucugcuuguucgugugugugucguugcaggccuuauucaagcuuaccaugggccagaucaucaccuucuuccaggaggugccccacgugaucgaggaggugaugaacaucgugcugaucgcccugagccugcuggccauccugaagggcaucuacaacguggugaccugcggccuguucggccuggugagcuuccugcugcugugcggcagaagcugcagcaccaccuacaagggcguguacgagcugcagacccuggagcuggacauggccagccugaacaugaccaugccccugagcugcaccaagaacaacagccaccacuacaucauggugggcaacgagaccggccuggagcugacccugaccaacaccagcaucaucaaccacaaguucugcaaccugagcgacgcccacaagaagaaccuguacgaccacgcccugaugagcaucaucagcaccuuccaccugagcauccccaacuucaaccaguacgaggccaugagcugcgacuucaacggcggcaagaucagcgugcaguacaaccugagccacgccuacgccaucgacgccgccaaccacugcggcaccaucgccaacggcgugcugcagaccuucaugagaauggccuggggcggcagcuacaucgcccuggacagcggcaagggcagcugggacugcaucaugaccagcuaccaguaccugaucauccagaacaccaccugggaggaccacugccaguucagcagacccagccccaucggcuaccugggccugcugagccagagaaccagagacaucuacaucagcagaagacugcugggcaccuucaccuggacccugagcgacagcgagggcaacgagacccccggcggcuacugccugaccagauggaugcugaucgaggccgagcugaagugcuucggcaacaccgccguggccaagugcaacgagaagcacgacgaggaguucugcgacaugcugagacuguucgacuucaacaagcaggccaucagaagacugaagaccgaggcccagaugagcauccagcugaucaacaaggccgugaacgcccugaucaacgaccagcugaucaugaagaaccaccugagagacaucaugggcauccccuacugcaacuacagcaaguacugguaccugaaccacaccgugaccggcaagaccagccugcccagaugcuggcuggugagcaacggcagcuaccugaacgagacccacuucagcgacgacaucgagcagcaggccgacaacaugaucaccgagcugcugcagaaggaguacaucgacagacagggcaagaccccccugggccugguggaccuguucguguucagcaccagcuucuaccugaucagcaucuuccugcaccuggugaagauccccugaggacuaguaauaaggaaacuguaugaaugucugugggcaggaagugaagagauccuucuguaaagguuuuuggaauuaugucugcugaauaauaaacuuuuuugaaauaauaaaucugguagaaaaaugagaucuaaaaaaaaaaaaaaaaaaaaaaaaaaaaaaaaaaaaaaaaaaaaaaaaaaaaaaaaaaaaaaaaaaaaaaaaaaaaaaaaaaaaaaaaaaaaaaaaaaaa

SEQ ID NO: 42867 - RNA, 1671 nt, Artificial Sequence
  mRNA product Design b-4 (A100) comprising derived and/or modified sequence from LASV(LASV003-NIG-2008;Clade II)__AIT17580__GPCmut13 (opt4)
aggagagucccgcagucggcguccagcggcucugcuuguucgugugugugucguugcaggccuuauucaagcuuaccaugggccagaucaucaccuucuuccaggaggugccccacgugaucgaggaggugaugaacaucgugcugaucgcccugagccugcuggccauccugaagggcaucuacaacguggccaccugcggccuguucggccuggugagcuuccugcugcugugcggcagaagcugcagcaccaccuacaagggcguguacgagcugcagacccuggagcuggacauggccagccugaacaugaccaugccccugagcugcaccaagaacaacagccaccacuacaucauggugggcaacgagaccggccuggagcugacccugaccaacaccagcaucaucaaccacaaguucugcaaccugagcgacgcccacaagaagaaccuguacgaccacgcccugaugagcaucaucagcaccuuccaccugagcauccccaacuucaaccaguacgaggccaugagcugcgacuucaacggcggcaagaucagcgugcaguacaaccugagccacaccuacgccguggacgccgccaaccacugcggcaccaucgccaacggcgugcugcagaccuucaugagaauggccuggggcggcagcuacaucgcccuggacagcggcaagggcagcugggacugcaucaugaccagcuaccaguaccugaucauccagaacaccaccugggaggaccacugccaguucagcagacccagccccaucggcuaccugggccugcugagccagagaaccagagacaucuacaucagcagaagacugcugggcaccuucaccuggacccugagcgacagcgagagcaacgagacccccggcggcuacugccugaccagauggaugcugaucgaggccgagcugaagugcuucggcaacaccgccguggccaagugcaacgagaagcacgacgaggaguucugcgacaugcugagacuguucgacuucaacaagcaggccaucagaagacugaaggccgaggcccagaugagcauccagcugaucaacaaggccgugaacgcccugaucaacgaccagcugaucaugaagaaccaccugagagacaucaugggcauccccuacugcaacuacagcaaguacugguaccugaaccacaccgugaccggcagaaccagccugcccagaugcuggcuggugagcaacggcagcuaccugaacgagacccacuucagcgacgacaucgagcagcaggccgacaacaugaucaccgagcugcugcagaaggaguacauggacagacagggcaagaccccccugggccugguggaccuguucguguucagcaccagcuucuaccugaucagcaucuuccugcaccuggugaagauccccugaggacuaguaauaaggaaacuguaugaaugucugugggcaggaagugaagagauccuucuguaaagguuuuuggaauuaugucugcugaauaauaaacuuuuuugaaauaauaaaucugguagaaaaaugagaucuaaaaaaaaaaaaaaaaaaaaaaaaaaaaaaaaaaaaaaaaaaaaaaaaaaaaaaaaaaaaaaaaaaaaaaaaaaaaaaaaaaaaaaaaaaaaaaaaaaaa

SEQ ID NO: 42868 - RNA, 1671 nt, Artificial Sequence
  mRNA product Design b-4 (A100) comprising derived and/or modified sequence from LASV(LASV035-NIG-2009;Clade II)__AIT17588__GPCmut13 (opt4)
aggagagucccgcagucggcguccagcggcucugcuuguucgugugugugucguugcaggccuuauucaagcuuaccaugggccagaucaucaccuucuuccaggaggugccccacgugaucgaggaggugaugaacaucgugcugaucgcccugagccugcuggccauccugaagggcaucuacaacguggccaccugcggccuguucggccuggugagcuuccugcugcugugcggcagaagcugcagcaccaccuacaagggcguguacgagcugcagacccuggagcuggacauggccagccugaacaugaccaugccccugagcugcaccaagaacaacagccaccacuacaucauggugggcaacgagaccggccuggagcugacccugaccaacaccagcaucaucaaccacaaguucugcaaccugagcgacgcccacaagaagaaccuguacgaccacgcccugaugagcaucaucagcaccuuccaccugagcauccccaacuucaaccaguacgaggccaugagcugcgacuucaacggcggcaagaucagcgugcaguacaaccugagccacgccuacgccguggacgccgccaaccacugcggcaccaucgccaacggcgugcugcagaccuucaugagaauggccuggggcggcagcuacaucgcccuggacagcggcaagggcagcugggacugcaucaugaccagcuaccaguaccugaucauccagaacaccaccugggaggaccacugccaguucagcagacccagccccaucggcuaccugggccugcugagccagagaaccagagacaucuacaucagcagaagacugcugggcaccuucaccuggacccugagcgacagcgagggcaacgagacccccggcggcuacugccugaccagauggaugcugaucgaggccgagcugaagugcuucggcaacaccgccguggccaagugcaacgagaagcacgacgaggaguucugcgacaugcugagacuguucgacuucaacaagcaggccaucagaagacugaaggccgaggcccagaugagcauccagcugaucaacaaggccgugaacgcccugaucaacgaccagcugaucaugaagaaccaccugagagacaucaugggcauccccuacugcaacuacagcaaguacugguaccugaaccacaccgugaccggcaagaccagccugcccagaugcuggcuggugagcaacggcagcuaccugaacgagacccacuucagcgacgacaucgagcagcaggccgacaacaugaucaccgagcugcugcagaaggaguacaucgacagacagggcaagaccccccugggccugguggaccuguucguguucagcaccagcuucuaccugaucagcaucuuccugcaccuggugaagauccccugaggacuaguaauaaggaaacuguaugaaugucugugggcaggaagugaagagauccuucuguaaagguuuuuggaauuaugucugcugaauaauaaacuuuuuugaaauaauaaaucugguagaaaaaugagaucuaaaaaaaaaaaaaaaaaaaaaaaaaaaaaaaaaaaaaaaaaaaaaaaaaaaaaaaaaaaaaaaaaaaaaaaaaaaaaaaaaaaaaaaaaaaaaaaaaaaa

SEQ ID NO: 42869 - RNA, 1671 nt, Artificial Sequence
  mRNA product Design b-4 (A100) comprising derived and/or modified sequence from LASV(LASV1000-NIG-2009;Clade II)__AIT17782__GPCmut13 (opt4)
aggagagucccgcagucggcguccagcggcucugcuuguucgugugugugucguugcaggccuuauucaagcuuaccaugggccagaucaucaccuucuuccaggaggugccccacgugaucgaggaggugaugaacaucgugcugaucgcccugagccugcuggccauccugaagggcaucuacaacguggccaccugcggccuguucggccuggugagcuuccugcugcugugcggcagaagcugcagcaccaccuacaagggcguguacgagcugcagacccuggagcuggacauggccagccugaacaugaccaugccccugagcugcaccaagaacaacagccaccacuacaucauggugggcaacgagaccggccuggagcugacccugaccaacaccagcaucaucaaccacaaguucugcaaccugagcgacgcccacaagaagaaccuguacgaccacgcccugaugagcaucaucagcaccuuccaccugagcauccccaacuucaaccaguacgaggccaugagcugcgacuucaacggcggcaagaucagcgugcaguacaaccugagccacaccuacgccguggacgccgccaaccacugcggcaccaucgccaacggcgugcugcagaccuucaugagaauggccuggggcggcagcuacaucgcccuggacagcggcaagggcagcugggacugcaucaugaccagcuaccaguaccugaucauccagaacaccaccugggaggaccacugccaguucagcagacccagccccaucggcuaccugggccugcugagccagagaaccagagacaucuacaucagcagaagacugcugggcaccuucaccuggacccugagcgacagcgagggcaacgagacccccggcggcuacugccugaccagauggaugcugaucgaggccgagcugaagugcuucggcaacaccgccguggccaagugcaacgagaagcacgacgaggaguucugcgacaugcugagacuguucgacuucaacaagcaggccaucaagagacugaagaccgaggcccagaugagcauccagcugaucaacaaggccgugaacgcccugaucaacgaccagcugaucaugaagaaccaccugagagacaucaugggcauccccuacugcaacuacagcaaguacugguaccugaaccacaccgugaccggcaagaccagccugcccagaugcuggcuggugagcaacggcagcuaccugaacgagacccacuucagcgacgacaucgagcagcaggccgacaacaugaucaccgagcugcugcagaaggaguacaucgacagacagggcaagaccccccugggccugguggaccuguucguguucagcaccagcuucuaccugaucagcaucuuccugcaccuggugaagauccccugaggacuaguaauaaggaaacuguaugaaugucugugggcaggaagugaagagauccuucuguaaagguuuuuggaauuaugucugcugaauaauaaacuuuuuugaaauaauaaaucugguagaaaaaugagaucuaaaaaaaaaaaaaaaaaaaaaaaaaaaaaaaaaaaaaaaaaaaaaaaaaaaaaaaaaaaaaaaaaaaaaaaaaaaaaaaaaaaaaaaaaaaaaaaaaaaa

SEQ ID NO: 42870 - RNA, 1671 nt, Artificial Sequence
  mRNA product Design b-4 (A100) comprising derived and/or modified sequence from LASV(LASV221-NIG-2010;Clade II)__AIT17624__GPCmut13 (opt4)
aggagagucccgcagucggcguccagcggcucugcuuguucgugugugugucguugcaggccuuauucaagcuuaccaugggccagaucaucaccuucuuccaggaggugccccacgugaucgaggaggugaugaacaucgugcugaucgcccugagccugcuggccauccugaagggcaucuacaacguggccaccugcggccuguucggccuggugagcuuccugcugcugugcggcagaagcugcagcaccaccuacaagggcguguacgagcugcagacccuggagcuggacauggccagccugaacaugaccaugccccugagcugcaccaagaacaacagccaccacuacaucauggugggcaacgagaccggccuggagcugacccugaccaacaccagcaucaucaaccacaaguucugcaaccugagcgacgcccacaagaagaaccuguacgaccacgcccugaugagcaucaucagcaccuuccaccugagcauccccaacuucaaccaguacgaggccaugagcugcgacuucaacggcggcaagaucagcgugcaguacaaccugagccacaccuacgccaucgacgccgccaaccacugcggcaccaucgccaacggcgugcugcagaccuucaugagaauggccuggggcggcagcuacaucgcccuggacagcggcaagggcagcugggacugcaucaugaccagcuaccaguaccugaucauccagaacaccaccugggaggaccacugccaguucagcagacccagccccaucggcuaccugggccugcugagccagagaaccagagacaucuacaucagcagaagacugcugggcaccuucaccuggacccugagcgacagcgagggcaacgagacccccggcggcuacugccugaccagauggaugcugaucgaggccgagcugaagugcuucggcaacaccgccguggccaagugcaacgagaagcacgacgaggaguucugcgacaugcugagacuguucgacuucaacaagcaggccaucagaagacugaagaccgaggcccagaugagcauccagcugaucaacaaggccgugaacgcccugaucaacgaccagcugaucaugaagaaccaccugagagacaucaugggcauccccuacugcaacuacagcaaguacugguaccugaaccacaccgugaccggcaagaccagccugcccagaugcuggcuggugagcaacggcagcuaccugaacgagacccacuucagcgacgacaucgagcagcaggccgacaacaugaucaccgagaugcugcagaaggaguacauggacagacagggcaagaccccccugggccugguggaccuguucguguucagcaccagcuucuaccugaucagcaucuuccugcaccuggugaagauccccugaggacuaguaauaaggaaacuguaugaaugucugugggcaggaagugaagagauccuucuguaaagguuuuuggaauuaugucugcugaauaauaaacuuuuuugaaauaauaaaucugguagaaaaaugagaucuaaaaaaaaaaaaaaaaaaaaaaaaaaaaaaaaaaaaaaaaaaaaaaaaaaaaaaaaaaaaaaaaaaaaaaaaaaaaaaaaaaaaaaaaaaaaaaaaaaaa

SEQ ID NO: 42871 - RNA, 1671 nt, Artificial Sequence
  mRNA product Design b-4 (A100) comprising derived and/or modified sequence from LASV(LASV237-NIG-2010;Clade II)__AIT17638__GPCmut13 (opt4)
aggagagucccgcagucggcguccagcggcucugcuuguucgugugugugucguugcaggccuuauucaagcuuaccaugggccagaucaucaccuucuuccaggaggugccccacgugaucgaggaggugaugaacaucgugcugaucgcccugagccugcuggccauccugaagggcaucuacaacguggccaccugcggccuguucggccuggugagcuuccugcugcugugcggcagaagcugcagcaccaccuacaagggcguguacgagcugcagacccuggagcuggacauggccagccugaacaugaccaugccccugagcugcaccaagaacaacagccaccacuacaucauggugggcaacgagaccggccuggagcugacccugaccaacaccagcaucaucaaccacaaguucugcaaccugagcgacgcccacaagaaggaccuguacgaccacgcccugaugagcaucaucagcaccuuccaccugagcauccccaacuucaaccaguacgaggccaugagcugcgacuucaacggcggcaagaucagcgugcaguacaaccugagccacaccuacgccguggacgccgccaaccacugcggcaccaucgccaacggcgugcugcagaccuucaugagaauggccuggggcggcagcuacaucgcccuggacagcggcaagggcagcugggacugcaucaugaccagcuaccaguaccugaucauccagaacaccaccugggaggaccacugccaguucagcagacccagccccaucggcuaccugggccugcugagccagagaaccagagacaucuacaucagcagaagacugcugggcaccuucaccuggacccugagcgacagcgagggcaacgagacccccggcggcuacugccugaccagauggaugcugaucgaggccgagcugaagugcuucggcaacaccgccguggccaagugcaacgagaagcacgacgaggaguucugcgacaugcugagacuguucgacuucaacaagcaggccaucagaagacugaagaccgaggcccagaugagcauccagcugaucaacaaggccgugaacgcccugaucaacgaccagcugaucaugaagaaccaccugagagacaucaugggcauccccuacugcaacuacagcaaguacugguaccugaaccacaccgugaccggcaagaccagccugcccagaugcuggcuggugagcaacggcagcuaccugaacgagacccacuucagcgacgacaucgagcagcaggccgacaacaugaucaccgagcugcugcagaaggaguacauggacagacagggcaagaccccccugggccugguggaccuguucguguucagcaccagcuucuaccugaucagcaucuuccugcaccugaucaagauccccugaggacuaguaauaaggaaacuguaugaaugucugugggcaggaagugaagagauccuucuguaaagguuuuuggaauuaugucugcugaauaauaaacuuuuuugaaauaauaaaucugguagaaaaaugagaucuaaaaaaaaaaaaaaaaaaaaaaaaaaaaaaaaaaaaaaaaaaaaaaaaaaaaaaaaaaaaaaaaaaaaaaaaaaaaaaaaaaaaaaaaaaaaaaaaaaaa

SEQ ID NO: 42872 - RNA, 1671 nt, Artificial Sequence
  mRNA product Design b-4 (A100) comprising derived and/or modified sequence from LASV(LASV253-NIG-2011;Clade II)__AIT17670__GPCmut13 (opt4)
aggagagucccgcagucggcguccagcggcucugcuuguucgugugugugucguugcaggccuuauucaagcuuaccaugggccagaucaucaccuucuuccaggaggugccccacgugaucgaggaggugaugaacaucgugcugaucgcccugagccugcuggccauccugaagggcaucuacaacguggccaccugcggccuguucggccuggugagcuuccugcugcugugcggcagaagcugcagcaccaccuacaagggcguguacgagcugcagacccuggagcuggacauggccagccugaacaugaccaugccccugagcugcaccaagaacaacagccaccacuacaucauggugggcaacgagaccggccuggagcugacccugaccaacaccagcaucaucaaccacaaguucugcaaccugagcgacgcccacaagaagaaccuguacgaccacgcccugaugagcaucaucagcaccuuccaccugagcauccccaacuucaaccaguacgaggccaugagcugcgacuucaacggcggcaagaucagcgugcaguacaaccugagccacaccuacgccguggacgccgccaaccacugcggcaccaucgccaacggcgugcugcagaccuucaugagaauggccuggggcggcagcuacaucgcccuggacagcggcaagggcagcugggacugcaucaugaccagcuaccaguaccugaucauccagaacaccaccugggaggaccacugccaguucagcagacccagccccaucggcuaccugggccugcugagccagagaaccagagacaucuacaucagcagaagacugcugggcaccuucaccuggacccugagcgacagcgagggcaacgagacccccggcggcuacugccugaccagauggaugcugaucgaggccgagcugaagugcuucggcaacaccgccguggccaagugcaacgagaagcacgacgaggaguucugcgacaugcugagacuguucgacuucaacaagcaggccaucagaagacugaaggccgaggcccagaugagcauccagcugaucaacaaggccgugaacgcccugaucaacgaccagcugaucaugaagaaccaccugagagacaucaugggcauccccuacugcaacuacagcaaguacugguaccugaaccacaccgugaccggcagaaccagccugcccagaugcuggcuggugagcaacggcagcuaccugaacgagacccacuucagcgacgacaucgagcagcaggccgacaacaugaucaccgagcugcugcagaaggaguacaucgacagacagggcaagaccccccugggccugguggaccuguucguguucagcaccagcuucuaccugaucagcaucuuccugcaccuggugaagauccccugaggacuaguaauaaggaaacuguaugaaugucugugggcaggaagugaagagauccuucuguaaagguuuuuggaauuaugucugcugaauaauaaacuuuuuugaaauaauaaaucugguagaaaaaugagaucuaaaaaaaaaaaaaaaaaaaaaaaaaaaaaaaaaaaaaaaaaaaaaaaaaaaaaaaaaaaaaaaaaaaaaaaaaaaaaaaaaaaaaaaaaaaaaaaaaaaa

SEQ ID NO: 42873 - RNA, 1671 nt, Artificial Sequence
  mRNA product Design b-4 (A100) comprising derived and/or modified sequence from LASV(LASV254-NIG-2011;Clade II)__AIT17674__GPCmut13 (opt4)
aggagagucccgcagucggcguccagcggcucugcuuguucgugugugugucguugcaggccuuauucaagcuuaccaugggccagaucaucaccuucuuccaggaggugccccacgugaucgaggaggugaugaacaucgugcugaucgcccugagccugcuggccauccugaagggcaucuacaacguggccaccugcggccuguucggccuggugagcuuccugcugcugugcggcagaagcugcagcaccaccuacaagggcguguacgagcugcagacccuggagcuggacaugaccaaccugaacaugaccaugccccugagcugcaccaagaacaacagccaccacuacaucauggugggcaacgagaccggccuggagcugacccugaccaacaccagcaucaucaaccacaaguucugcaaccugagcgacgcccacaagaagaaccuguacaaccacgcccugaugagcaucaucagcaccuuccaccugagcauccccaacuucaaccaguacgaggccaugagcugcgacuucaacggcggcaagaucagcgugcaguacaaccugagccacagcuacgccguggacgccgccaaccacugcggcaccaucgccaacggcgugcugcagaccuucaugagaauggccuggggcggcagcuacaucgcccuggacagcggcaagggcaacugggacugcaucaugaccagcuaccaguaccugaucauccagaacaccaccugggaggaccacugccaguucagcagacccagccccaucggcuaccugggccugcugagccagagaaccagagacaucuacaucagcagaagacugcugggcaccuucaccuggacccugagcgacagcgagggcaacgagacccccggcggcuacugccugaccagauggaugcugaucgaggccgagcugaagugcuucggcaacaccgccguggccaagugcaacgagaagcacgacgaggaguucugcgacaugcugagacuguucgacuucaacaagcaggccaucagaagacugaagaccgaggcccaggccaacauccagcugaucaacaaggccgugaacgcccugaucaacgaccagcugaucaugaagaaccaccugagagacaucaugggcauccccuacugcaacuacagcaaguacugguaccugaaccacaccgugaccggcaagaccagccugcccagaugcuggcuggugagcaacggcagcuaccugaacgagacccacuucagcgacgacaucgagcagcaggccgacaacaugaucaccgagcugcugcagaaggaguacauggacagacagggcaagaccccccugggccugguggaccuguucguguucagcaccagcuucuaccugaucagcaucuuccugcaccuggugaagauccccugaggacuaguaauaaggaaacuguaugaaugucugugggcaggaagugaagagauccuucuguaaagguuuuuggaauuaugucugcugaauaauaaacuuuuuugaaauaauaaaucugguagaaaaaugagaucuaaaaaaaaaaaaaaaaaaaaaaaaaaaaaaaaaaaaaaaaaaaaaaaaaaaaaaaaaaaaaaaaaaaaaaaaaaaaaaaaaaaaaaaaaaaaaaaaaaaa

SEQ ID NO: 42874 - RNA, 1671 nt, Artificial Sequence
  mRNA product Design b-4 (A100) comprising derived and/or modified sequence from LASV(Nig08-A19;Clade III)__ADU56618__GPCmut13 (opt4)
aggagagucccgcagucggcguccagcggcucugcuuguucgugugugugucguugcaggccuuauucaagcuuaccaugggccagaucgugaccuucuuccaggaggugccccacgugaucgaggaggugaugaacaucgugcugaucgcccugagcauccuggccauccugaagggccuguacaacaucgccaccugcggccugaucggccuggugaccuuccugcugcugagcggcagaagcugcagcaugaccuacaagggcguguacgagcugcagacccuggagcugaacaugaacacccugaacaugaccaugccccugagcugcaccaagaacaacagccaccacuacaucauggugggcaacgagaccggccuggagcugacccugaccaacaccagccugcugcaccacaaguucugcaaccugagcgacgcccacaagaagaaccuguacgaccacacccugaugagcaucaucagcaccuuccaccugagcauccccaacuucaaccaguacgaggccaugagcugcgacuucaacggcggcaagaucaccgugcaguacaaccugagccacagcuacgccaucgacgccgccaaccacugcggcaccguggccaacggcgugcugcagaccuucaugagaauggccuggggcggcagcuacaucgcccuggacagcggcagaggcaagugggacugcaucaugaccagcuaccaguaccugaucauccagaacaccaccugggaggaccacugccaguucagcagacccagccccaucggcuaccugggccugcugagccagagaaccagagacaucuacaucagcagaagacugcugggcaccuucaccuggacccugagcgacagcgagggcaacgagacccccggcggcuacugccugaccagauggaugcugaucgaggccgagcugaagugcuucggcaacaccgccguggccaagugcaacgagaagcacgacgaggaguucugcgacaugcugagacuguucgacuucaacaagcaggccaucagaagacugaaggccgaggcccagaugagcauccagcugaucaacaaggccgugaacgcccugaucaacgaccagcugaucaugaagaaccaccugagagacaucaugggcauccccuacugcaacuacagcaaguacugguaccugaaccacaccagcaccggcagaaccagccugcccagaugcuggcuggugagcaacggcagcuaccugaacgagacccacuucagcgacgacaucgagcagcaggccgacaacaugaucaccgagaugcugcagaaggaguaccuggacagacagggcaagaccccccugggccugguggaccuguucguguucagcaccagcuucuaccugaucagcaucuuccugcaccuggugaagauccccugaggacuaguaauaaggaaacuguaugaaugucugugggcaggaagugaagagauccuucuguaaagguuuuuggaauuaugucugcugaauaauaaacuuuuuugaaauaauaaaucugguagaaaaaugagaucuaaaaaaaaaaaaaaaaaaaaaaaaaaaaaaaaaaaaaaaaaaaaaaaaaaaaaaaaaaaaaaaaaaaaaaaaaaaaaaaaaaaaaaaaaaaaaaaaaaaa

SEQ ID NO: 42875 - RNA, 1674 nt, Artificial Sequence
  mRNA product Design b-4 (A100) comprising derived and/or modified sequence from LASV(G1180-SLE-2010;Clade IV)__AIT17168__GPCmut13 (opt4)
aggagagucccgcagucggcguccagcggcucugcuuguucgugugugugucguugcaggccuuauucaagcuuaccaugggccagaucgugaccuucuuccaggaggugccccacgugaucgaggaggugaugaacaucgugcugaucgcccugagcauccuggccgugcugaagggccuguacaacuucgccaccugcggccuggugggccugcugaccuuccugcugcugugcggcagaagcugcaccgccagcagauacaagggcguguacgagcugcagacccuggagcugaacauggagacccugaacaugaccaugccccugagcugcaccaagaacaacagccaccacuacaucauggugggcaacgagaccggccuggagcugacccugaccaacaccagcaucaucaaccacaaguucugcaaccugagcgacgcccacaagaagaaccuguacgaccacgcccugaugagcaucaucagcaccuuccaccugagcauccccaacuucaaccaguacgaggccaugagcugcgacuucaacggcggcaagaucagcgugcaguacaaccugagccacagcuacgccggcgacgccgccaaccacugcggcaccguggccaacggcgugcugcagaccuucaugagaauggccuggggcggcagcuacaucgcccuggacagcggccacggcagcugggacugcaucaugaccagcuaccaguaccugaucauccagaacaccaccugggaggaccacugccaguucagcagacccagccccaucggcuaccugggccugcugagccagagaaccagagacaucuacaucagcagaagacugcugggcaccuucaccuggacccugagcgacagcgagggcaaggacacccccggcggcuacugccugaccagauggaugcugaucgaggccgagcugaagugcuucggcaacaccgccguggccaagugcaacgagaagcacgacgaggaguucugcgacaugcugagacuguucgacuucaacaagcaggccauccagagacugaaggccgaggcccagaugagcauccagcugaucaacaaggccgugaacgcccugaucaacgaccagcugaucaugaagaaccaccugagagacaucaugggcauccccuacugcaacuacagcaaguacugguaccugaaccacaccaccaccggcaagaccagccugcccaagugcuggcuggugagcaacggcagcuaccugaacgagacccacuucagcgacgacaucgagcagcaggccgacaacaugaucaccgagaugcugcagaaggaguacauggagagacagggcaagaccccccugggccugguggaccuguucguguucagcaccagcuucuaccugaucagcaucuuccugcaccuggugaagauccccugaggacuaguaauaaggaaacuguaugaaugucugugggcaggaagugaagagauccuucuguaaagguuuuuggaauuaugucugcugaauaauaaacuuuuuugaaauaauaaaucugguagaaaaaugagaucuaaaaaaaaaaaaaaaaaaaaaaaaaaaaaaaaaaaaaaaaaaaaaaaaaaaaaaaaaaaaaaaaaaaaaaaaaaaaaaaaaaaaaaaaaaaaaaaaaaaa

SEQ ID NO: 42876 - RNA, 1674 nt, Artificial Sequence
  mRNA product Design b-4 (A100) comprising derived and/or modified sequence from LASV(G1442-SLE-2011;Clade IV)__AIT17180__GPCmut13 (opt4)
aggagagucccgcagucggcguccagcggcucugcuuguucgugugugugucguugcaggccuuauucaagcuuaccaugggccagaucgugaccuucuuccaggaggugccccacgugaucgaggaggugaugaacaucgugcugaucgcccugagcauccuggccgugcugaagggccuguacaacguggccaccugcggccugaucggccuggugaccuuccugcugcugugcggcagaagcugcaccaccacccuguacaagggcguguacgagcugcagacccuggagcugaacauggagacccugaacaugaccaugccccugagcugcaccaagaacaacagccaccacuacaucagagugggcaacgagaccggccuggagcugacccugaccaacaccagcaucaucaaccacaaguucugcaaccugagcgacgcccacaagaagaaccuguacgaccacgcccugaugagcaucaucagcaccuuccaccugagcauccccaacuucaaccaguacgaggccaugagcugcgacuucaacggcggcaagaucagcgugcaguacaaccugagccacagcuacgccggcgacgccgccaaccacugcggcaccguggccaacggcgugcugcagaccuucaugagaauggccuggggcggcagcuacaucgcccuggacagcggcagaggcaacugggacugcaucaugaccagcuaccaguaccugaucauccagaacaccaccugggacgaccacugccaguucagcagacccagccccaucggcuaccugggccugcugagccagagaaccagagacguguacaucagcagaagacugcugggcaccuucaccuggacccugagcgacagcgagggcaaggacacccccggcggcuacugccugaccagauggaugcugaucgaggccgagcugaagugcuucggcaacaccgccguggccaagugcaacgagaagcacgacgaggaguucugcgacaugcugagacuguucgacuucaacaagcaggccauccagagacugaaggccgaggcccagaugagcauccagcugaucaacaaggccgugaacgcccugaucaacgaccagcugaucaugaagaaccaccugagagacaucaugggcauccccuacugcaacuacagcaaguacugguaccugaacaacaccgccaccggcaagaccagccugcccaagugcuggcugaucagcaacggcagcuaccugaacgagacccacuucagcgacgacaucgagcaggaggccgacaacaugaucaccgagaugcugcagaaggaguacauggagagacagggcaagaccccccugggccugguggaccuguucguguucagcaccagcuucuaccugaucagcaucuuccugcaccuggugaagauccccugaggacuaguaauaaggaaacuguaugaaugucugugggcaggaagugaagagauccuucuguaaagguuuuuggaauuaugucugcugaauaauaaacuuuuuugaaauaauaaaucugguagaaaaaugagaucuaaaaaaaaaaaaaaaaaaaaaaaaaaaaaaaaaaaaaaaaaaaaaaaaaaaaaaaaaaaaaaaaaaaaaaaaaaaaaaaaaaaaaaaaaaaaaaaaaaaa

SEQ ID NO: 42877 - RNA, 1674 nt, Artificial Sequence
  mRNA product Design b-4 (A100) comprising derived and/or modified sequence from LASV(G3010-SLE-2013;Clade IV)__AIT17344__GPCmut13 (opt4)
aggagagucccgcagucggcguccagcggcucugcuuguucgugugugugucguugcaggccuuauucaagcuuaccaugggccagaucgugaccuucuuccaggaggugccccacgugaucgaggaggugaugaacaucgugcugaucgcccugagcauccuggccgugcugaagggccuguacaacuucgccaccugcggccuggugggccuggugaccuuccugcugcugugcggcagaagcugcaccaccagccuguacaagggcguguacgagcugcagacccuggagcugaacauggagacccugaacaugaccaugccccugagcugcaccaagaacaacagccaccacuacaucauggugggcaacgagaccggccuggagcugacccugaccaacaccagcaucaucaaccacaaguucugcaaccugagcgacgcccacaagaagaaccuguacaaccacgcccugaugagcaucaucagcaccuuccaccugagcauccccaacuucaaccaguacgaggccaugagcugcgacuucaacggcggcaagaucagcgugcaguacaaccugagccacagcuacgccggcgacgccgccagccacugcggcaccguggccaacggcgugcugcagaccuucaugagaauggccuggggcggcagcuacaucgcccuggacagcggcuacggcaagugggacugcaucaugaccagcuaccaguaccugaucauccagaacaccaccugggaggaccacugccaguucagcagacccagccccaucggcuaccugggccugcugagccagagaaccagagacaucuacaucagcagaagacugcugggcaccuucaccuggacccugagcgacagcgagggcaaggacacccccggcggcuacugccugaccagauggaugcugaucgaggccgagcugaagugcuucggcaacaccgccguggccaagugcaacgagaagcacgacgaggaguucugcgacaugcugagacuguucgacuucaacaagcaggccauccagagacugaagaccgaggcccagaugagcauccagcugaucaacaaggccgugaacgcccugaucaacgaccagcugaucaugaagaaccaccugagagacaucaugggcauccccuacugcaacuacagcaaguacugguaccugaaccacaccaccaccggcaagaccagccugcccaagugcuggcuggugagcaacggcagcuaccugaacgagacccacuucagcgacgacaucgagcagcaggccgacaacaugaucaccgagaugcugcagaaggaguacauggagagacagggcaagaccccccugggccugguggaccuguucguguucagcaccagcuucuaccugaucagcaucuuccugcaccuggugaagauccccugaggacuaguaauaaggaaacuguaugaaugucugugggcaggaagugaagagauccuucuguaaagguuuuuggaauuaugucugcugaauaauaaacuuuuuugaaauaauaaaucugguagaaaaaugagaucuaaaaaaaaaaaaaaaaaaaaaaaaaaaaaaaaaaaaaaaaaaaaaaaaaaaaaaaaaaaaaaaaaaaaaaaaaaaaaaaaaaaaaaaaaaaaaaaaaaaa

SEQ ID NO: 42878 - RNA, 1674 nt, Artificial Sequence
  mRNA product Design b-4 (A100) comprising derived and/or modified sequence from LASV(G502-SLE-2009;Clade IV)__AIT17126__GPCmut13 (opt4)
aggagagucccgcagucggcguccagcggcucugcuuguucgugugugugucguugcaggccuuauucaagcuuaccaugggccagaucgugaccuucuuccaggaggugccccacgugaucgaggaggugaugaacaucgugcugaucgcccugagcauccuggccgugcugaagggccuguacaacuucgccaccugcggccuggugggccugcugaccuuccugcugcugugcggcagaagcugcaccaccggccuguacaagggcguguacgagcugcagacccuggagcugaacauggagacccugaacaugaccaugccccugagcugcaccaagaacaacagccaccacuacaucauggugggcaacgagaccggccuggagcugacccugaccaacaccagcaucaucaaccacaaguucugcaaccugagcgacgcccacaagaagaaccuguacgaccacgcccugaugagcaucaucagcaccuuccaccugagcauccccaacuucaaccaguacgaggccaugagcugcgacuucaacggcggcaagaucagcgugcaguacaaccugagccacagcuacgccggcgacgccgccgaccacugcggcaccguggccaacggcgugcugcagaccuucaugagaauggccuggggcggcagcuacaucgcccuggacagcggcagaggcagaugggacugcaucaugaccagcuaccaguaccugaucauccagaacaccaccugggaggaccacugccaguucagcagacccagccccaucggcuaccugggccugcugagccagagaaccagagacaucuacaucagcagaagacugcugggcaccuucaccuggacccugagcgacagcgagggcaaggacacccccggcggcuacugccugaccagauggaugcugaucgaggccgagcugaagugcuucggcaacaccgccguggccaagugcaacgagaagcacgacgaggaguucugcgacaugcugagacuguucgacuucaacaagcaggccauccagagacugaaggccgaggcccagaugagcauccagcugaucaacaaggccgugaacgcccugaucaacgaccagcuggugaugaagaaccaccugagagacaucaugggcauccccuacugcaacuacagcagauacugguaccugaaccacaccaccaccggcagaaccagccugcccaagugcuggcuggugagcaacggcagcuaccugaacgagacccacuucagcgacgacaucgagcagcaggccgacaacaugaucaccgagaugcugcagaaggaguacauggagagacagggcaagaccccccugggccugguggaccuguucguguucagcaccagcuucuaccugaucagcaucuuccugcaccuggugaagauccccugaggacuaguaauaaggaaacuguaugaaugucugugggcaggaagugaagagauccuucuguaaagguuuuuggaauuaugucugcugaauaauaaacuuuuuugaaauaauaaaucugguagaaaaaugagaucuaaaaaaaaaaaaaaaaaaaaaaaaaaaaaaaaaaaaaaaaaaaaaaaaaaaaaaaaaaaaaaaaaaaaaaaaaaaaaaaaaaaaaaaaaaaaaaaaaaaa

SEQ ID NO: 42879 - RNA, 1674 nt, Artificial Sequence
  mRNA product Design b-4 (A100) comprising derived and/or modified sequence from LASV(G733-SLE-2010;Clade IV)__AIT17154__GPCmut13 (opt4)
aggagagucccgcagucggcguccagcggcucugcuuguucgugugugugucguugcaggccuuauucaagcuuaccaugggccagaucgugaccuucuuccaggaggugccccacgugaucgaggaggugaugaacaucgugcugaucgcccugagcauccuggccgugcugaagggccuguacaacuucgccaccugcggcaucgugggccuggugagcuuccugcugcugugcggcagaagcugcaccaccagccuguacaagggcguguacgagcugcagacccuggagcugaacauggagacccugaacaugaccaugccccugagcugcaccaagaacaacagccaccacuacaucauggugggcaacgagaccggccuggagcugacccugaccaacaccagcaucaucaaccacaaguucugcaaccugagcgacgcccacaagaagaaccuguacgaccacgcccugaugagcaucaucagcaccuuccaccugagcauccccaacuucaaccaguacgaggccaugagcugcgacuucaacggcggcaagaucagcgugcaguacaaccugagccacagcuacgccggcgacgccgccaaccacugcggcaccaucgccaacggcgugcugcagaccuucaugagaauggccuggggcggcagcuacaucgcccuggacagcggcagagacagaugggacugcaucaugaccagcuaccaguaccugaucauccagaacaccaccugggaggaccacugccaguucagcagacccagccccaucggcuaccugggccugcugagccagagaaccagagacaucuacaucagcagaagacugcugggcaccuucaccuggacccugagcgacagcgagggcaaggacacccccggcggcuacugccugaccagauggaugcugaucgaggccgagcugaagugcuucggcaacaccgccguggccaagugcaacgagaagcacgacgaggaguucugcgacaugcugagacuguucgacuucaacaagcaggccauccagagacugaaggccgaggcccagaugagcauccagcugaucaacaaggccgugaacgcccugaucaacgaccagcugaucaugaagaaccaccugagagacaucaugggcauccccuacugcaacuacagcaaguacugguaccugaaccacaccaccaccggcaagaccagccugcccaagugcuggcuggugagcaacggcagcuaccugaacgagacccacuucagcgacgacaucgagcagcaggccgacaacaugaucaccgagaugcugcagaaggaguacauggagagacagggcaagaccccccugggccugguggaccuguucguguucagcaccagcuucuaccugaucagcaucuuccugcaccuggugaagauccccugaggacuaguaauaaggaaacuguaugaaugucugugggcaggaagugaagagauccuucuguaaagguuuuuggaauuaugucugcugaauaauaaacuuuuuugaaauaauaaaucugguagaaaaaugagaucuaaaaaaaaaaaaaaaaaaaaaaaaaaaaaaaaaaaaaaaaaaaaaaaaaaaaaaaaaaaaaaaaaaaaaaaaaaaaaaaaaaaaaaaaaaaaaaaaaaaa

SEQ ID NO: 42880 - RNA, 1674 nt, Artificial Sequence
  mRNA product Design b-4 (A100) comprising derived and/or modified sequence from MOPV/LASV reassortant(IGS-1;Clade IV)__AFY05576__GPCmut13 (opt4)
aggagagucccgcagucggcguccagcggcucugcuuguucgugugugugucguugcaggccuuauucaagcuuaccaugggccagaucgugaccuucuuccaggaggugccccacgugaucgaggaggugaugaacaucgugcugaucgcccugagcgugcuggccgugcugaagggccuguacaacuucgccaccugcggccuggugggccuggugaccuuccugcugcugugcggcagaagcugcaccaccagccuguacaagggcguguacgagcugcagacccuggagcugaacauggagacccugaacaugaccaugccccugagcugcaccaagaacaacagccaccacuacaucauggugggcaacgagaccggccuggagcugacccugaccaacaccagcaucaucaaccacaaguucugcaaccugagcgacgcccacaagaagaaccuguacgaccacgcccugaugagcaucaucagcaccuuccaccugagcauccccaacuucaaccaguacgaggccaugagcugcgacuucaacggcggcaagaucagcgugcaguacaaccugagccacagcuacgccggcgacgccgccaaccacugcggcaccguggccaacggcgugcugcagaccuucaugagaauggccuggggcggcagcuacaucgcccuggacagcggcagaggcaacugggacugcaucaugaccagcuaccaguaccugaucauccagaacaccaccugggaggaccacugccaguucagcagacccagccccaucggcuaccugggccugcugagccagagaaccagagacaucuacaucagcagaagacugcugggcaccuucaccuggacccugagcgacagcgagggcgaggacacccccggcggcuacugccugaccagauggaugcugaucgaggccgagcugaagugcuucggcaacaccgccguggccaagugcaacgagaagcacgacgaggaguucugcgacaugcugagacuguucgacuucaacaagcaggccauccagagacugaaggccgaggcccagaugagcauccagcugaucaacaaggccgugaacgcccugaucaacgaccagcugaucaugaagaaccaccugagagacaucaugggcauccccuacugcaacuacagcaaguacugguaccugaaccacaccaccaccggcagaaccagccugcccaagugcuggcuggugagcaacggcagcuaccugaacgagacccacuucagcgacgacaucgagcagcaggccgacaacaugaucaccgagaugcugcagaaggaguacauggagagacagggcaagaccccccugggccugguggaccuguucguguucagcaccagcuucuaccugaucagcaucuuccugcaccuggugaagauccccugaggacuaguaauaaggaaacuguaugaaugucugugggcaggaagugaagagauccuucuguaaagguuuuuggaauuaugucugcugaauaauaaacuuuuuugaaauaauaaaucugguagaaaaaugagaucuaaaaaaaaaaaaaaaaaaaaaaaaaaaaaaaaaaaaaaaaaaaaaaaaaaaaaaaaaaaaaaaaaaaaaaaaaaaaaaaaaaaaaaaaaaaaaaaaaaaa

SEQ ID NO: 42881 - RNA, 1674 nt, Artificial Sequence
  mRNA product Design b-4 (A100) comprising derived and/or modified sequence from LASV(LM765-SLE-2012;Clade IV)__AIT17814__GPCmut13 (opt4)
aggagagucccgcagucggcguccagcggcucugcuuguucgugugugugucguugcaggccuuauucaagcuuaccaugggccagaucgugaccuucuuccaggaggugccccacgugaucgaggaggugaugaacaucgugcugaucgcccugagcauccuggccgugcugaagggccuguacaacuucgccaccugcggccuggugggccuggugaccuuccugcugcugugcggcagaagcugcaccaccagccuguacaagggcguguacgagcugcagacccuggagcugaacauggagacccugaacaugaccaugccccugagcugcaccaagaacaacagccaccacuacaucauggugggcaacgagaccggccuggagcugacccugaccaacaccagcaucaucgaccacaaguucugcaaccugagcgacgcccacagaaagaaccuguacgaccacgcccugaugagcaucaucagcaccuuccaccugagcauccccaacuucaaccaguacgaggccaugagcugcgacuucaacggcggcaagaucagcgugcaguacaaccugagccacagcuacgccaaggacgccgccgaccacugcggcaccguggccaacggcgugcugcagaccuucaugagaauggccuggggcggcagcuacaucgcccuggacagcggcagaggcagaugggacugcaucaugaccagcuaccaguaccugaucauccagaacaccaccugggaggaccacugccaguucagcagacccagccccaucggcuaccugggccugcugagccagagaaccagagacaucuacaucagcagaagacugcugggcaccuucaccuggacccugagcgacagcgagggcaaggacacccccggcggcuacugccugaccagauggaugcugaucgaggccgagcugaagugcuucggcaacaccgccguggccaagugcaacgagaagcacgacgaggaguucugcgacaugcugagacuguucgacuucaacaagcaggccauccagagacugaaggccgaggcccagaugagcauccagcugaucaacaaggccgugaacgcccugaucaacgaccagcugaucaugaagaaccaccugagagacaucaugggcauccccuacugcaacuacagcaaguacugguaccugaaccacaccaccaccggcaagaccagccugcccaagugcuggcuggugagcaacggcagcuaccugaacgagacccacuucagcgacgacaucgagcagcaggccgacaacaugaucaccgagaugcugcagaaggaguacauggagagacagggcaagaccccccugggccugguggaccuguucguguucagcaccagcuucuaccugaucagcaucuuccugcaccuggugaagauccccugaggacuaguaauaaggaaacuguaugaaugucugugggcaggaagugaagagauccuucuguaaagguuuuuggaauuaugucugcugaauaauaaacuuuuuugaaauaauaaaucugguagaaaaaugagaucuaaaaaaaaaaaaaaaaaaaaaaaaaaaaaaaaaaaaaaaaaaaaaaaaaaaaaaaaaaaaaaaaaaaaaaaaaaaaaaaaaaaaaaaaaaaaaaaaaaaa

SEQ ID NO: 42882 - RNA, 1674 nt, Artificial Sequence
  mRNA product Design b-4 (A100) comprising derived and/or modified sequence from LASV(LM776-SLE-2012;Clade IV)__AIT17824__GPCmut13 (opt4)
aggagagucccgcagucggcguccagcggcucugcuuguucgugugugugucguugcaggccuuauucaagcuuaccaugggccagaucgugaccuucuuccaggaggugccccacgugaucgaggaggugaugaacaucgugcugaucgcccugagcauccuggccgugcugaagggccuguacaacuucgccaccugcggccuggugggccuggugaccuuccugcugcugugcggcagaagcugcaccaccagcguguacaagggcguguacgagcugcagacccuggagcugaacauggagacccugaacaugaccaugccccugagcugcaccaagaacaacagccaccacuacaucauggugggcaacgagaccggccuggagcugacccugaccaacaccagcaucaucaaccacaaguucugcaaccugagcgacgcccacaagaagaaccuguacgaccacgcccugaugagcaucaucagcaccuuccaccugagcauccccaacuucaaccaguacgaggccaugagcugcgacuucaacggcggcaagaucagcgugcaguacaaccugagccacagcuacgccggcgacgccgccaaccacugcggcaccguggccaacggcgugcugcagaccuucaugagaauggccuggggcggcagcuacaucgcccuggacagcggccacggcaagugggacugcaucaugaccagcuaccaguaccugaucauccagaacaccaccugggaggaccacugccaguucagcagacccagccccaucggcuaccugggccugcugagccagagaaccagagacaucuacaucagcagaagacugcugggcaccuucaccuggacccugagcgacagcgagggcaaggacacccccggcggcuacugccugaccagauggaugcugaucgaggccgagcugaagugcuucggcaacaccgccguggccaagugcaacgagaagcacgacgaggaguucugcgacaugcugagacuguucgacuucaacaagcaggccauccagagacugaaggccgaggcccagaugagcauccagcugaucaacaaggccgugaacgcccugaucaacgaccagcugaucaugaagaaccaccugagagacaucaugggcauccccuacugcaacuacagcaaguacugguaccugaaccacaccaccaccggcaagaccagccugcccaagugcuggcuggugagcaacggcagcuaccugaacgagacccacuucagcgacgacaucgagcagcaggccgacaacaugaucaccgagaugcugcagaaggaguacauggagagacagggcaagaccccccugggccugguggaccuguucguguucagcaccagcuucuaccugaucagcaucuuccugcaccuggugaagauccccugaggacuaguaauaaggaaacuguaugaaugucugugggcaggaagugaagagauccuucuguaaagguuuuuggaauuaugucugcugaauaauaaacuuuuuugaaauaauaaaucugguagaaaaaugagaucuaaaaaaaaaaaaaaaaaaaaaaaaaaaaaaaaaaaaaaaaaaaaaaaaaaaaaaaaaaaaaaaaaaaaaaaaaaaaaaaaaaaaaaaaaaaaaaaaaaaa

SEQ ID NO: 42883 - RNA, 1674 nt, Artificial Sequence
  mRNA product Design b-4 (A100) comprising derived and/or modified sequence from LASV(Mad39;Clade IV)__ANH09722__GPCmut13 (opt4)
aggagagucccgcagucggcguccagcggcucugcuuguucgugugugugucguugcaggccuuauucaagcuuaccaugggccagaucgugaccuucuuccaggaggugccccacgugaucgaggaggugaugaacaucgugcugaucgcccugagcauccuggccgugcugaagggccuguacaacguggccaccugcggccugaucggccuggugaccuuccugcugcugugcggcagaagcugcaccaccacccuguacaagggcguguacgagcugcaggcccuggagcugaacauggagacccugaacaugaccaugccccugagcugcaccaagaacaacagccaccacuacaucagagugggcaacgagaccggccuggagcugacccugaccaacaccagccugaucaaccacaaguucugcaaccugagcgacgcccacaagaagaaccuguacgaccacgcccugaugagcaucaucagcaccuuccaccugagcauccccaacuucaaccaguacgaggccaugagcugcgacuucaacgacggcaagaucagcgugcaguacaaccugagccacaccuacgccggcgacaccgccaaccacugcggcaccguggccaacggcgugcugcagaccuucaugagaauggccuggggcggcagcuacaucgcccuggacagcggcagaggcggcugggacugcaucaugaccagcuaccaguaccugaucauccagaacaccaccugggaggaccacugccaguucagcagacccagccccaucggcuaccugggccugcugagccagagaaccagagacaucuacaucagcagaagacugcugggcaccuucaccuggacccugagcgacagcgagggcaaggacacccccggcggcuacugccugaccagauggaugcugaucgaggccgagcugaagugcuucggcaacaccgccguggccaagugcaacgagaagcacgacgaggaguucugcgacaugcugagacuguucgacuucaacaagcaggccauccagagacugaaggccgaggcccagaugagcauccagcugaucaacaaggccgugaacgcccugaucaacgaccagcugaucaugaagaaccaccugagagacaucaugggcauccccuacugcaacuacagcaaguacugguaccugaaccacaccgugaccggcaagaccagccugcccaagugcuggcuggugagcaacggcagcuaccugaacgagacccacuucagcgacgacaucgagcagcaggccgacaacaugaucaccgagaugcugcagaaggaguacauggagagacagggcaagaccccccugggccugguggaccuguucguguucagcaccagcuucuaccugaucagcaucuuccugcaccuggugaagauccccugaggacuaguaauaaggaaacuguaugaaugucugugggcaggaagugaagagauccuucuguaaagguuuuuggaauuaugucugcugaauaauaaacuuuuuugaaauaauaaaucugguagaaaaaugagaucuaaaaaaaaaaaaaaaaaaaaaaaaaaaaaaaaaaaaaaaaaaaaaaaaaaaaaaaaaaaaaaaaaaaaaaaaaaaaaaaaaaaaaaaaaaaaaaaaaaaa

SEQ ID NO: 42884 - RNA, 1674 nt, Artificial Sequence
  mRNA product Design b-4 (A100) comprising derived and/or modified sequence from LASV(Z0947-SLE-2011;Clade IV)__AIT17840__GPCmut13 (opt4)
aggagagucccgcagucggcguccagcggcucugcuuguucgugugugugucguugcaggccuuauucaagcuuaccaugggccagaucgugaccuucuuccaggaggugccccacgugaucgaggaggugaugaacaucgugcugaucgcccugagcauccuggccgugcugaagggccuguacaacuucgccaccugcggccuggugggccuggugaccuuccugcugcugugcggcagaagcugcaccaucagccuguacaagggcguguacgagcugcagacccuggagcugaacauggagacccugaacaugaccaugccccugagcugcaccaagaacaacagccaccacuacaucauggugggcaacgagaccggccuggagcugacccugaccaacaccagcaucaucaaccacaaguucugcaaccugagcgacgcccacaagaagaaccuguacgaccacgcccugaugagcaucaucagcaccuuccaccugagcauccccaacuucaaccaguacgaggccaugagcugcgacuucaacggcggcaagaucagcgugcaguacaaccugagccacagcuacgccggcgacgccgccaaccacugcggcaccguggccaacggcgugcugcagaccuucaugagaauggccuggggcggcagcuacaucgcccuggacagcggcagagacagaugggacugcaucaugaccagcuaccaguaccugaucauccagaacaccaccugggaggaccacugccaguucagcagacccagccccaucggcuaccugggccugcugagccagagaaccagagacaucuacaucagcagaagacugcugggcaccuucaccuggacccugagcgacagcgagggcaaggacacccccggcggcuacugccugaccagauggaugcugaucgaggccgagcugaagugcuucggcaacaccgccguggccaagugcaacgagaagcacgacgaggaguucugcgacaugcugagacuguucgacuucaacaagcaggccauccagagacugaaggccgaggcccagaugagcauccagcugaucaacaaggccgugaacgcccugaucaacgaccagcugaucaugaagaaccaccugagagacaucaugggcauccccuacugcaacuacagcaaguacugguaccugaaccacaccaccaccggcaagaccagccugcccaagugcuggcuggugagcaacggcagcuaccugaacgagacccacuucagcgacgacaucgagcagcaggccgacaacaugaucaccgagaugcugcagaaggaguacauggagagacagggcaagaccccccugggccugguggaccuguucguguucagcaccagcuucuaccugaucagcaucuuccugcaccuggugaagauccccugaggacuaguaauaaggaaacuguaugaaugucugugggcaggaagugaagagauccuucuguaaagguuuuuggaauuaugucugcugaauaauaaacuuuuuugaaauaauaaaucugguagaaaaaugagaucuaaaaaaaaaaaaaaaaaaaaaaaaaaaaaaaaaaaaaaaaaaaaaaaaaaaaaaaaaaaaaaaaaaaaaaaaaaaaaaaaaaaaaaaaaaaaaaaaaaaa

SEQ ID NO: 42885 - RNA, 1674 nt, Artificial Sequence
  mRNA product Design b-4 (A100) comprising derived and/or modified sequence from LASV(Josiah;Clade IV)__NP_694870__GPCmut13 (opt5)
aggagagucccgcagucggcguccagcggcucugcuuguucgugugugugucguugcaggccuuauucaagcuuaccaugggccagaucgugaccuucuuucaagaggucccccacguuauugaagaggugaugaacaucgugcugauugcccucagcguccuggcugugcuuaaggggcuguacaauuucgccacaugcggacucguuggccuggugacguuucuucugcucugugggagauccugcaccacaucucuguauaaaggagucuacgaacugcagacccucgagcugaacauggaaacacuuaauaugaccaugccucugagcuguacaaagaacaauucccaucacuauaucauggugggcaacgagaccgggcucgagcugacgcuuaccaauacaucuauuaucaaccauaaauucugcaaucugagcgacgcgcacaagaaaaaccucuacgaucaugcucugauguccaucauuucuaccuuucaccugagcaucccgaauuucaaccaguaugaagccauguccugugacuuuaauggaggcaagauuagcguucaguacaaccucucucacuccuaugccggcgaugcugccaaucauugcgggacaguggcuaacggaguccugcaaaccuucaugcggauggccuggggcgggagcuacaucgcgcuugacucuggacgcggcaacugggauuguauuaugacguccuaccaguaucugaucauucagaauacaaccugggaggaccacugccaguuuagcagacccucuccuaucggguaccucggacugcuuucccaacggacacgcgauaucuauauuagcagacggcugcucggcaccuucaccuggacacuguccgacucugaaggcaaggauacgcccgggggauacugucugacccgcuggaugcucaucgaggccgagcugaaaugcuuuggcaacacagcuguggccaaguguaaugaaaaacaugacgaggaguucugcgauaugcuuagacuguuugacuucaacaagcaggcuauucagcggcucaaagccgaagcgcagaugagcauccaacugauuaauaaggccgugaacgcucuuaucaaugaucagcugaucaugaagaaccaccuccgcgacauuauggggaucccuuauugcaauuacuccaaauauugguaccugaaccacaccacaaccggaagaacgagccugcccaaguguuggcucgucucuaauggcuccuaccugaacgaaacacauuucagcgacgauauugagcagcaagccgacaauaugaucaccgagaugcuucagaaagaauauauggagcggcaggggaagaccccucugggacucguugaucuguuuguguucucuaccagcuuuuaccugauuuccaucuuccuucaccucgugaaaaucccgugaggacuaguaauaaggaaacuguaugaaugucugugggcaggaagugaagagauccuucuguaaagguuuuuggaauuaugucugcugaauaauaaacuuuuuugaaauaauaaaucugguagaaaaaugagaucuaaaaaaaaaaaaaaaaaaaaaaaaaaaaaaaaaaaaaaaaaaaaaaaaaaaaaaaaaaaaaaaaaaaaaaaaaaaaaaaaaaaaaaaaaaaaaaaaaaaa

SEQ ID NO: 42886 - RNA, 1671 nt, Artificial Sequence
  mRNA product Design b-4 (A100) comprising derived and/or modified sequence from LASV(LP;Clade I)__AAF86701__GPCmut13 (opt5)
aggagagucccgcagucggcguccagcggcucugcuuguucgugugugugucguugcaggccuuauucaagcuuaccaugggccagaucauuaccuucuuucaagaggugccccacgucaucgaagagguuaugaacauugugcugaucgcccucagccugcuugcuauucugaaggggcucuacaauaucgccacaugcggaaucauuggccugguggcguuccuuuuucugugugggaaauccugcucucucacgcugaagggaggcuaugaacugcagacccucgagcugaacauggaaacacuuaauaugaccaugccucugagcuguaccaaaaacuccucucaucacuacaucagagucgggaaugagacaggacucgagcugacacuuaccaacacgagcauuaucaaucauaaguucugcaaccuguccgacgcucacaaaaagaaucucuaugaucaugcccugaugucuauuaucagcaccuuucaccuguccauuccgaacuucaaucaguacgaagccaugagcugugacuuuaacggcggcaagaucucugugcaguauaaucucucccacagcuacgcuggggaugccgcugagcauugcggaacaguugccaacggcgugcugcaaaccuucaugcggauggcguggggagggcgcuauaucgcccuugacucuggcaaagggaauugggauuguauuaugacauccuaccaguaccugaucauucagaacaccacgugggaagaccacugccaguuuagcagacccucuccuaucggauaucucggccugcuuucccaacggacacgcgauauuuacaucagcagacggcugcucggcaccuucacauggacccuguccgacucugaggggaacgagacccccggaggcuauugucugacacgcuggaugcucaucgaagcugagcugaagugcuuugggaauacggccgucgcuaaauguaacgaaaagcaugaugaggaguucugcgacaugcuuagacuguuugauuucaauaaacaggccauucggcgccucaaggcggaagcccagaugagcauccagcugauuaacaaggcugugaaugcccuuaucaacgaccaacugauuaugaaaaaucaccucagagauaucaugggaaucccuuacugcaacuauuccaaguacugguaucugaaucacaccagcucuggccggacaucccugcccaaauguuggcucauuagcaacgggucuuaccugaaugagacccaguucagcgacgacaucgaacagcaagcugauaacaugauuacagagaugcuucagaaggaauacaucgagcgccagggaaaaaccccucugggccucguugacauuuuuaucuucuccacgucuuuuuaucugauuagcaucuuccugcaucuuaucaagauuccgugaggacuaguaauaaggaaacuguaugaaugucugugggcaggaagugaagagauccuucuguaaagguuuuuggaauuaugucugcugaauaauaaacuuuuuugaaauaauaaaucugguagaaaaaugagaucuaaaaaaaaaaaaaaaaaaaaaaaaaaaaaaaaaaaaaaaaaaaaaaaaaaaaaaaaaaaaaaaaaaaaaaaaaaaaaaaaaaaaaaaaaaaaaaaaaaaa

SEQ ID NO: 42887 - RNA, 1671 nt, Artificial Sequence
  mRNA product Design b-4 (A100) comprising derived and/or modified sequence from LASV(803213;Clade II)__AAF86703__GPCmut13 (opt5)
aggagagucccgcagucggcguccagcggcucugcuuguucgugugugugucguugcaggccuuauucaagcuuaccaugggccagaucauuaccuucuuucaagaggugccccacgucaucgaagagguuaugaacauugugcugaucgcccucagccugcuugcuauucugaaggggaucuacaauguggccacaugcggacucuucggccugaucuccuuucuucugcucugugggagaucuugcagcgucacguauaaaggaguguacgaacugcagacccuggagcucaacauggcgaaucugaacaugacaaugccucuuuccuguaccaagaauaacucucaucacuauauuaugguuggcaaugaaacagggcuggagcucacccugacaaacaccagcaucauuaaucauaaauucugcaaccuuuccgacgcucacaagaaaaaucuguacgaucaugcccucaugucuaucauuagcacguuucaccuguccaucccgaacuucaaucaguaugaggccaugagcugugacuuuaacggaggcaagauuucugugcaguacaaucugucccacagcuucgcugucgaugccgcuaaccauugcggcaccaucgccaacggggugcuccaaacauuuaugcggauggcguggggaggcucuuauaucgcccuggacuccgggaagggaaauugggauuguauuaugaccagcuaccaguaccuuaucauucagaacacaaccugggaagaccacugccaguucucucgccccuccccuaucggcuaucuggggcuccugagccaaagaacgcgggauauuuacaucucccgcagacuucugggaacauuuaccuggacacucucugacagcgagggcaaugaagcucccggcggguauugucugacccgguggaugcugaucgaggccgagcucaaaugcuucggaaacaccgcuguugccaaguguaaugaaaaacaugaugaggaauuuugcgacaugcugcgccuuuucgauuucaacaagcaggcgauuaaaagacugaagacagaggcccagauguccauccagcucauuaauaaggcugugaacgcccugaucaaugaccaacuuauuaugaaaaaccaucugcgggauaucaugggcaucccuuacugcaauuauagccgcuacugguaucucaaccacacggucaccgggaagacaucucugcccagauguuggcugguguccaauggaagcuaccucaacgaaacccacuuuucugacgacauugagcagcaggcugauaauaugaucacagagaugcugcaaaaagaauacauggaccggcagggcaagaccccucuugggcugguggaucucuucgucuuuagcacguccuucuaucugauuucuaucuuucugcaccuuguuaaaauuccgugaggacuaguaauaaggaaacuguaugaaugucugugggcaggaagugaagagauccuucuguaaagguuuuuggaauuaugucugcugaauaauaaacuuuuuugaaauaauaaaucugguagaaaaaugagaucuaaaaaaaaaaaaaaaaaaaaaaaaaaaaaaaaaaaaaaaaaaaaaaaaaaaaaaaaaaaaaaaaaaaaaaaaaaaaaaaaaaaaaaaaaaaaaaaaaaaa

SEQ ID NO: 42888 - RNA, 1671 nt, Artificial Sequence
  mRNA product Design b-4 (A100) comprising derived and/or modified sequence from LASV(GA391;Clade III)__CAA36645__GPCmut13 (opt5)
aggagagucccgcagucggcguccagcggcucugcuuguucgugugugugucguugcaggccuuauucaagcuuaccaugggccagaucgugaccuucuuucaagaggucccccacguuauugaagaggugaugaacaucgugcugauugcccucagcauccuggcuauucuuaaggggcuguacaaugucgccacaugcggacucaucggccuggugacguuccuucugcucuccgggagaucuuguagccugaucuauaaaggaaccuacgaacugcagacacucgagcugaacauggaaacccuuaauaugacaaugccucuguccugcaccaagaacaauucucaucacuauauucggguuggcaacgagacagggcucgagcugacccuuacgaauaccagcauccugaaccauaaauuuuguaaucucuccgacgcgcacaagcgcaaccuguacgaucauucucugaugagcauuaucuccacauuccaccucagcauuccgaauuuuaaccaguaugaagcuaugucuugcgacuucaauggaggcaaaaucaccgugcaguacaaccugucccacagcuuugccgucgaugccgcuggccauugugggacacuugccaauggagugcugcaaaccuucaugagaauggcuuggggcgggucuuauauugcccucgacuccggacggggcaacugggauugcaucaugacgagcuaccaguaccugaucauucagaacacaaccugggacgaucacugucaguuuucucgccccuccccuaucggguaucuuggacugcucagccaaagaacacgggacauuuacaucucccgcagacugcugggcaccuucaccuggacacucucugauagcgagggcaaugaaacgcccgggggauauugccugacccgguggaugcuuauugaggcggagcugaaguguuuuggcaacacagccguugcuaagugcaaugaaaaacaugacgaggaguucugugauaugcuccgccuguuugacuucaacaagcaggccaucagacggcuuaaaaccgaagcucagauguccauccagcugauuaauaaggccgugaacgcgcucaucaaugaucaacugauuaugaaaaaccaucugcgcgacaucauggggauuccuuacugcaauuauagcagauacugguaucucaaccacacaucuaccggaaagacgucccugccccggugcuggcuuaucagcaauggcucuuaccugaacgaaacaaaguucagcgacgauaucgagcagcaggccgacaauaugauuaccgagaugcuccaaaaagaauacaucgaucgccaggggaagaccccucugggacuggucgaccuuuuuguguucuccacaucuuuuuaucucauuagcaucuuccugcaccuggugaaaauuccgugaggacuaguaauaaggaaacuguaugaaugucugugggcaggaagugaagagauccuucuguaaagguuuuuggaauuaugucugcugaauaauaaacuuuuuugaaauaauaaaucugguagaaaaaugagaucuaaaaaaaaaaaaaaaaaaaaaaaaaaaaaaaaaaaaaaaaaaaaaaaaaaaaaaaaaaaaaaaaaaaaaaaaaaaaaaaaaaaaaaaaaaaaaaaaaaaa

SEQ ID NO: 42889 - RNA, 1674 nt, Artificial Sequence
  mRNA product Design b-4 (A100) comprising derived and/or modified sequence from LASV(AV;Clade V)__CCA30314__GPCmut13 (opt5)
aggagagucccgcagucggcguccagcggcucugcuuguucgugugugugucguugcaggccuuauucaagcuuaccaugggccagaucgugaccuucuuucaagaggucccccacguuauugaagaggugaugaacaucgugcugauugcccucagcauccuggcuguccuuaaggggcuguacaauauugccacaugcggacucaucggccugaucacguuccuucugcucugugggagauccugcucuagcaaccuguauaaaggaguguacgaacugcagucccucgaccugaauauggagacccuuaacaugacaaugccucugucuuguaccaagaauaacagccaucacuauauucggguuggcaaugauacagggcucgaacugacccuuacaaacaccuccauccugaaucauaaauuuugcaaccucucugacgcgcacaagaaagaucuguacgaccaugcucugaugagcauuaucuccacguuccaccucagcauuccgaauuuuaaccaguaugaggccaugucuugugauuucaauggaggcaagaucuccgugcaguacaaccugagccacucuuaugccauugacgcugccaaucauugcggcaccgucgcuaacgggauccuucaaacauuuaugcgcauggccuggggaggcuccuacaucgcgcuggauagcgggagaggaaacugggacuguauuaugaccucuuaccaguaucucaucauucagaauacaaccugggagaaccacugccaguucucccggcccagcccuaucggcuaccuggggcuucugucccaacgcacgagagauauuuauaucucucggcgccuccugggaacauuuaccuggacacugagcgacuccgaaggcaaugccacccccggcggguacugucucaccagauggaugcugaucgaggcugaacuuaagugcuucggaaacacagccguggcuaaauguaaugagaagcaugaugaggaauuuugcgacaugcugcgccucuucgauuuuaacaaacaggccauuagccggcugaagucugaggcgcagauguccauccagcuuauuaauaaagccguuaacgcucugaucaaugaccaacucauuaugaagaaccaccugagagacaucaugggcaucccuuauugcaauuacagcaaguauugguaccugaaccacacgauuaccgggaaaacaucucuccccaaguguuggcuggugagcaauggauccuaccuuaacgaaacccauuucucugaugacaucgagcagcaggccgauaauaugauuacagaaaugcugcaaaaagaguauauggagcggcagggcaagaccccucucgggcuggucgaccuguucguguuuagcacguccuucuaccuuaucagcauuuuucuccgccuggugaaaaucccgugaggacuaguaauaaggaaacuguaugaaugucugugggcaggaagugaagagauccuucuguaaagguuuuuggaauuaugucugcugaauaauaaacuuuuuugaaauaauaaaucugguagaaaaaugagaucuaaaaaaaaaaaaaaaaaaaaaaaaaaaaaaaaaaaaaaaaaaaaaaaaaaaaaaaaaaaaaaaaaaaaaaaaaaaaaaaaaaaaaaaaaaaaaaaaaaaa

SEQ ID NO: 42890 - RNA, 1671 nt, Artificial Sequence
  mRNA product Design b-4 (A100) comprising derived and/or modified sequence from LASV(Togo/2016/7082;Clade VI)__AMR44577__GPCmut13 (opt5)
aggagagucccgcagucggcguccagcggcucugcuuguucgugugugugucguugcaggccuuauucaagcuuaccaugggccagaucauuaccuucuuucaagaggugccccacgucaucgaagagguuaugaacauugugcugaucgcccucagccugcuugcuauucugaaggggguguacaaugucgccacaugcggaaucaucggccucgugacguuccuguuucuuugugggagauccugcucucugauuuauaaaggaagcuacgaacuccagacccuggagcugaacauggaaacacucaauaugaccaugccucuguccuguacaaagaacucuagccaucacuauauccggguuggcaaugagaccgggcuugagcugacacucaccaacacguccauuaucaaucauaaauucugcaaccugucugacgcgcacaagcgcaaucuuuacgaucaugcucugaugagcauucucuccaccuuucaccugagcaucccgaacuucaaucaguaugaagccaugucuugugacuuuaacggaggcaaaauuuccgugcaguacaaucugagccacgccuaugcugucgaugccgcugagcauugcggcacaguggccaacgggguucuccaaaccuucaugagaauggcguggggaggcucuuacaucgcccuggacuccgggcggggaaauugggauuguaucaugacaagcuaccaguaucuuauuauccagaacaccacgugggaagaccacugccaguuuucucgccccuccccuauuggcuaccuggggcuccugagccaaagaacacgggauaucuauauuucccgcagacuucugggaaccuucacauggacccucucugacagcgagggcaacgagacccccggcggguacugucugacacgguggaugcugaucgaagcugagcucaagugcuuuggaaauacggccguggcuaaguguaacgaaaaacaugaugaggaguucugcgacaugcugcgccuuuuugauuucaauaagcaggccauccagagacugaaauccgaagcgcagaugagcauucaacucaucaacaaggccgucaaugcucugauuaacgaccagcuuaucaugaaaaaucaucugcgggauaugaugggcauuccuuauugcaacuacucuaaguauugguaccucaaucacaccuccagcgggcgcacaucucugcccaaguguuggcuggugagcaacggauccuaccucaaugagacccacuucucugacgacaucgaacagcaagccgauaacaugaucacagagaugcugcagaaagaauauauugacagacagggcaagaccccucuugggcugguggaucucuuugucuucagcacguccuuuuaccugaucagcauuuuccugcaccuuaucaaaauuccgugaggacuaguaauaaggaaacuguaugaaugucugugggcaggaagugaagagauccuucuguaaagguuuuuggaauuaugucugcugaauaauaaacuuuuuugaaauaauaaaucugguagaaaaaugagaucuaaaaaaaaaaaaaaaaaaaaaaaaaaaaaaaaaaaaaaaaaaaaaaaaaaaaaaaaaaaaaaaaaaaaaaaaaaaaaaaaaaaaaaaaaaaaaaaaaaaa

SEQ ID NO: 42891 - RNA, 1671 nt, Artificial Sequence
  mRNA product Design b-4 (A100) comprising derived and/or modified sequence from LASV(KAK-428;Clade n.d. (VII))__ANH09740__GPCmut13 (opt5)
aggagagucccgcagucggcguccagcggcucugcuuguucgugugugugucguugcaggccuuauucaagcuuaccaugggccagaucgugaccuucuuucaagaggucccccacguuauugaagaggugaugaacaucgugcugauugcccucagccugcuugcuauccugaaggggcucuacaauuucgccacaugcggagucauuggccugaucacguuucuucugcucugugggagauccugcucugcgaccuauaaaggacaguacgaacugcagacacuggagcucaacauggaaagccugaauaugaccaugccucuuuccuguacaaagaacaauucucaucacuauauccgggcuggcaacaauaccgggcuggagcucacacugaccaacacgagcauuaucucccauaaauucugcaaucuuucugacgcccacaagaaaaaccuguacgaucauacccucaugagcauuaucacaaccuuucaccuguccauuccgaauuucaaccaguaugaggccaugagcugugacuuuaauggaggcaagaucucuauucaauacaaccugucccacagcuaugcuggcgaugccgcucagcauugcgggacaguggccaauggaguucuccagaccuucaugcgcauggcguggggcgggucuuaccuggcccuugacuccggaagacggggcugggauuguaucaucagcucuuaccaguaucugauuauccaaaacacgacaugggacgaucacugccaguuuucccgccccagcccuauuggguaccucggauucgugucccagaagaccagagacaucuauauuucucggcgccugcuuggcacauuuaccuggacccugagcgauuccgaaggccaugacaugcccgggggauacugucucacaagauggaugcugaucgaggcugaucugaaaugcuucggcaacacggccgucgcuaaguguaaugaaaaacacgacgaggaguuuugcgauauguggcgccucuucgacuucaacaagcaggccauccaacggcugaaagcggaagcccagaugaauauucagcuuaucaacaaggcugugaaugcccugauuaacgaccaacucaugaugaagaaucaccugagagauaucauggggauuccuuauugcaacuacagcaaauuuugguaucuuaauaacaccacaaccggacggacaucucugccccgcuguuggcucaucuccaauggcagcuaccugaacgagacccauuucucugacgauaucgaacagcaggcugacaauaugauuacggagaugcugcagaaggaauacauggauagacaagggaaaacaccucucggacugguugaccuuuuuguguucagcaccuccuuuuaucugaucaccauuuuccuccaccuggucaagaucccgugaggacuaguaauaaggaaacuguaugaaugucugugggcaggaagugaagagauccuucuguaaagguuuuuggaauuaugucugcugaauaauaaacuuuuuugaaauaauaaaucugguagaaaaaugagaucuaaaaaaaaaaaaaaaaaaaaaaaaaaaaaaaaaaaaaaaaaaaaaaaaaaaaaaaaaaaaaaaaaaaaaaaaaaaaaaaaaaaaaaaaaaaaaaaaaaaa

SEQ ID NO: 42892 - RNA, 1671 nt, Artificial Sequence; identical to SEQ ID NO: 42886
  mRNA product Design b-4 (A100) comprising derived and/or modified sequence from LASV(Pinneo-NIG-1969;Clade I)__AIT17836__GPCmut13 (opt5)

SEQ ID NO: 42893 - RNA, 1671 nt, Artificial Sequence
  mRNA product Design b-4 (A100) comprising derived and/or modified sequence from LASV(ISTH0009-NIG-2011;Clade II)__AIT17404__GPCmut13 (opt5)
aggagagucccgcagucggcguccagcggcucugcuuguucgugugugugucguugcaggccuuauucaagcuuaccaugggccagaucauuaccuucuuucaagaggugccccacgucaucgaagagguuaugaacauugugcugaucgcccucagccugcuugcuauucugaaggggaucuacaauguggccacaugcggacucuucggccuggucuccuuucuucugcucugugggagaucuugcagcacgaccuauaaaggaguguacgaacugcagacacuggagcucgacauggcgucccugaacaugaccaugccucuuucuuguacaaagaauaacagccaucacuauaucaugguuggcaaugaaaccgggcuggagcucacacugaccaacacguccauuaucaaucauaaauucugcaaccuuucugaugcucacaagaaaaaucuguacgaccaugcccucaugagcauuaucuccaccuuucaccugagcauuccgaacuucaaucaguaugaggccaugucuugugauuuuaacggaggcaagaucuccgugcaguacaaucugagccacgcuuaugccgucgacgcugccaaccauugcggcacaauugcgaauggggugcuccaaaccuucaugcggauggccuggggaggcucuuacaucgcucuggauuccgggaagggaagcugggacuguaucaugacaucuuaccaguaucuuauuauccagaacaccacgugggaagaucacugccaguuuucccgccccagcccuauuggcuaccuggggcuccugucccaaagaacacgggacaucuauauuucucgcagacuucugggaaccuucacauggacccucagcgauuccgagggcaacgaaacccccggcggguacugucugacacgguggaugcugaucgaggccgagcucaaaugcuuuggaaauacggcuguugccaaguguaacgaaaaacaugacgaggaguucugcgauaugcugcgccuuuuugacuucaauaagcaggcgaucagacggcugaaaaccgaagcccagaugagcauucagcucaucaacaaggcugugaaugcccugauuaacgaucaacuuaucaugaagaaucaucugcgcgacauuaugggcaucccuuauugcaacuacucuaaauauugguaccucaaucacacagucaccgggaagacaucccugcccagauguuggcuggugagcaacggaucuuaccucaaugaaacccacuucagcgacgauaucgagcagcaggcugacaacaugauuacggagcugcuucaaaaagaauauauggaucggcagggcaagacaccucuggggcucguggaccuguuugucuucuccaccucuuuuuaccugaucagcauuuuccuucaccucaucaaaauuccgugaggacuaguaauaaggaaacuguaugaaugucugugggcaggaagugaagagauccuucuguaaagguuuuuggaauuaugucugcugaauaauaaacuuuuuugaaauaauaaaucugguagaaaaaugagaucuaaaaaaaaaaaaaaaaaaaaaaaaaaaaaaaaaaaaaaaaaaaaaaaaaaaaaaaaaaaaaaaaaaaaaaaaaaaaaaaaaaaaaaaaaaaaaaaaaaaa

SEQ ID NO: 42894 - RNA, 1671 nt, Artificial Sequence
  mRNA product Design b-4 (A100) comprising derived and/or modified sequence from LASV(ISTH2010-NIG-2012;Clade II)__AIT17482__GPCmut13 (opt5)
aggagagucccgcagucggcguccagcggcucugcuuguucgugugugugucguugcaggccuuauucaagcuuaccaugggccagaucauuaccuucuuucaagaggugccccacgucaucgaagagguuaugaacauugugcugaucgcccucagccugcuugcuauucugaaggggaucuacaauguggccacaugcggacucuucggccuggucuccuuucuucugcucugugggagaucuugcagcacgaccuauaaaggaguguacgaacugcagacacuggagcucgacauggcgucccugaacaugaccaugccucuuucuuguacaaagaauaacagccaucacuauaucaugguuggcaaugaaaccgggcuggagcucacacugaccaacacguccauuaucaaucauaaauucugcaaccuuucugaugcucacaagaaaaaucuguacgaccaugcccucaugagcauuaucuccaccuuucaccugagcauuccgaacuucaaucaguaugaggccaugucuugugauuuuaacggaggcaagaucuccgugcaguacaaucugagccacgcuuaugccgucgacgcugccaaccauugcggcacaauugcgaauggggugcuccaaaccuucaugcggauggccuggggaggcucuuacaucgcucuggauuccgggaagggaagcugggacuguaucaugacaucuuaccaguaucuuauuauccagaacauuaccugggaagaucacugccaguuuucccgccccagcccuaucggcuaccuggggcuccugucccaaagaacgcgggacauuuauaucucucgcagacuucugggaacauucaccuggacacucagcgauuccgagggcaacgaaacccccggcggguacugucugacccgguggaugcugaucgaggccgagcucaaaugcuuuggaaauacagcuguugccaaguguaacgaaaaacaugacgaggaguucugcgauaugcugcgccuuuuugacuucaauaagcaggcgauuagacggcugaaaacggaagcccagaugagcauccagcucauuaacaaggcugugaaugcccugaucaacgaucaacuuauuaugaagaaucaucugcgcgacaucaugggcaucccuuauugcaacuacucuaaauauugguaccucaaucacaccgucacagggaagaccucccugcccagauguuggcuggugagcaacggaucuuaccucaaugaaacacacuucagcgacgauauugagcagcaggcugacaacaugaucaccgagcugcuucaaaaagaauauauugaucggcagggcaagacgccucuggggcucguggaccuguuugucuucuccacaucuuuuuaccugaucagcauuuuccuucaccucguuaaaaucccgugaggacuaguaauaaggaaacuguaugaaugucugugggcaggaagugaagagauccuucuguaaagguuuuuggaauuaugucugcugaauaauaaacuuuuuugaaauaauaaaucugguagaaaaaugagaucuaaaaaaaaaaaaaaaaaaaaaaaaaaaaaaaaaaaaaaaaaaaaaaaaaaaaaaaaaaaaaaaaaaaaaaaaaaaaaaaaaaaaaaaaaaaaaaaaaaaa

SEQ ID NO: 42895 - RNA, 1671 nt, Artificial Sequence
  mRNA product Design b-4 (A100) comprising derived and/or modified sequence from LASV(Lassa virus/H.sapiens-wt/NGA/2015/ISTH_0543;Clade II)__AVO03639__GPCmut13 (opt5)
aggagagucccgcagucggcguccagcggcucugcuuguucgugugugugucguugcaggccuuauucaagcuuaccaugggccagaucauuaccuucuuucaagaggugccccacgucaucgaagagguuaugaacauugugcugaucgcccucagccugcuugcuauucugaaggggaucuacaauguggccacaugcggacucuucggccuggucuccuuucuucugcucugugggagaucuugcagcacgaccuauaaaggaguguacgaacugcagacacuggagcucgacauggcgaaccugaauaugaccaugccucuuuccuguacaaagaacaauucucaucacuauaucaugguuggcaacgaaaccgggcuggagcucacacugaccaauacgagcauuaucaaccauaaauucugcaaucuuuccgaugcucacaagaaaaaccuguacgaccaugcccucaugucuauuaucagcaccuuucaccuguccauuccgaauuucaaccaguaugaggccaugagcugugauuuuaauggaggcaagaucucugugcaguacaaccugucccacacauaugcugucgacgccgcuaaucauugcggcaccauugccaacggggugcuccaaacauucaugcggauggcguggggaggcagcuacaucgcccuggauucugggaagggauccugggacuguaucaugaccagcuaccaguaucuuguuauucagaacacgacaugggaagaucacugccaguuuucucgccccuccccuaucggcuaccuggggcuccugagccaaagaacccgggacauuuauaucucccgcagacuucugggaacauucaccuggacccucucugauagcgagggcaaugaaacacccggcggguacugucugacgcgguggaugcugauugaggcugagcucaaaugcuuuggaaacaccgccguggcuaaguguaaugaaaaacaugacgaggaguucugcgauaugcugcgccuuuuugacuucaacaagcaggccaucagacggcugaaaacagaagcgcagauguccauccagcucauuaauaaggccgucaacgcucugaucaaugaucaacuuauuaugaagaaccaucugcgcgacaucaugggcauuccuuauugcaauuacagcaaauauugguaccucaaccacaccgugacagggaagaccucucugcccagauguuggcugguguccaauggaagcuaccucaacgaaacgcacuucucugacgauaucgagcagcaggccgacaauaugaucacagagcugcuucaaaaagaauauauugaucggcagggcaagaccccucuggggcucgucgaccuguuuguuuucagcaccuccuuuuaccugaucucuauuuuccuucaccucgugaaaaucccgugaggacuaguaauaaggaaacuguaugaaugucugugggcaggaagugaagagauccuucuguaaagguuuuuggaauuaugucugcugaauaauaaacuuuuuugaaauaauaaaucugguagaaaaaugagaucuaaaaaaaaaaaaaaaaaaaaaaaaaaaaaaaaaaaaaaaaaaaaaaaaaaaaaaaaaaaaaaaaaaaaaaaaaaaaaaaaaaaaaaaaaaaaaaaaaaaa

SEQ ID NO: 42896 - RNA, 1671 nt, Artificial Sequence
  mRNA product Design b-4 (A100) comprising derived and/or modified sequence from LASV(Lassa virus/H.sapiens-wt/NGA/2016/ISTH_0009;Clade II)__AVO03571__GPCmut13 (opt5)
aggagagucccgcagucggcguccagcggcucugcuuguucgugugugugucguugcaggccuuauucaagcuuaccaugggccagaucauuaccuucuuucaagaggugccccacgucaucgaagagguuaugaacauugugcugaucgcccucagccugcuugcuauucugaaggggaucuacaauguggccacaugcggacuccugggccuugucuccuuccugcuccugugugggagaucuugcagcacgaccuauaaaggaguguacgaacugcagacacucgagcuggacauggcgucccuuaacaugaccaugccucugucuuguacaaagaauaacagccaucacuauaucaugguuggcaaugaaaccgggcucgagcugacacuuaccaacacguccauuaucaaucauaaauuuugcaaccugucugaugcucacaagaaaaaucucuacgaccaugcccugaugagcauuaucuccaccuuccaccugagcauuccgaacuuuaaucaguaugaggccaugucuugugauuucaacggaggccggaucuccgugcaguacaaucucagccacucuuaugcugucgacgccgcuaaccauugcggcacaauugccaauggggugcugcaaaccuuuaugcgcauggcguggggaggcuccuacaucgcccuugauagcgggaagggaucuugggacuguaucaugacauccuaccaguaucugauuauccagaacaccacgugggaagaucacugccaguucagcagacccuccccuauuggcuaccucgggcugcuuucucaacggacacgcgacaucuauauuagcagacggcugcucggaaccuuuacauggacccuguccgauagcgagggcaacgaaacccccggcggguacugucugacacgcuggaugcucaucgaggcugagcugaagugcuucggaaauacggccguugcuaaauguaacgaaaagcaugacgaggaauuuugcgauaugcuuagacuguucgacuuuaauaaacaggccauccggcgccucaagaccgaggcgcagaugucuauucagcugaucaacaaagccgugaaugcucuuauuaacgaucaacugaucaugaagaaucaccucagagacauuaugggcaucccuuauugcaacuacuccaaguauugguaccugaaucacacagucaccgggaaaacaagccugccccgguguuggcucgugucuaacggaagcuaccugaaugaaacccauuucuccgacgauaucgagcagcaggccgacaacaugauuacggagcuucugcaaaaggaauauaucgaucgccagggcaaaacaccucucgggcugguggaccuguucgucuuuucuaccagcuucuaccuuauuuccaucuuucuccaccugguuaagauuccgugaggacuaguaauaaggaaacuguaugaaugucugugggcaggaagugaagagauccuucuguaaagguuuuuggaauuaugucugcugaauaauaaacuuuuuugaaauaauaaaucugguagaaaaaugagaucuaaaaaaaaaaaaaaaaaaaaaaaaaaaaaaaaaaaaaaaaaaaaaaaaaaaaaaaaaaaaaaaaaaaaaaaaaaaaaaaaaaaaaaaaaaaaaaaaaaaa

SEQ ID NO: 42897 - RNA, 1671 nt, Artificial Sequence
  mRNA product Design b-4 (A100) comprising derived and/or modified sequence from LASV(Lassa virus/H.sapiens-wt/NGA/2016/ISTH_0017;Clade II)__AVO03567__GPCmut13 (opt5)
aggagagucccgcagucggcguccagcggcucugcuuguucgugugugugucguugcaggccuuauucaagcuuaccaugggccagaucauuaccuucuuucaagaggugccccacgucaucgaagagguuaugaacauugugcugaucgcccucagccugcuugcuauucugaaggggaucuacaauguggccacaugcggacucuucggccuggucuccuuucuucugcucugugggagaucuugcagcacgaccuauaaaggaguguacgaacugcagacacuggagcucgacauggcgucccugaacaugaccaugccucuuucuuguacaaagaauaacagccaucacuauaucaugguuggcaaugaaaccgggcuggagcucacacugaccaacacguccauuaucaaucauaaauucugcaaccuuucugaugcucacaagaaaaaucuguacgaccaugcccucaugagcauuaucuccaccuuucaccugagcauuccgaacuucaaucaguaugaggccaugucuugugauuuuaacggaggcaagaucuccgugcaguacaaucugagccacacauaugcuauugacgccgcuaaccauugcggcaccaucgccaaugggguccuccaaacauucaugcggauggcguggggaggcucuuacaucgcccuggauuccgggaagggaagcugggacuguauuaugaccucuuaccaguaucuuaucauucagaacacgacaugggaagaucacugccaguuuucccgccccagcccuaucggcuaccuggggcuccugucccaaagaacccgggacauuuauaucucucgcagacuucugggaacauucaccuggacccucagcgauuccgagggcaacgaaacacccggcggguacugucugacgcgguggaugcugaucgaggcugagcucaaaugcuuuggaaauaccgccguggcuaaguguaacgaaaaacaugacgaggaguucugcgauaugcugcgccuuuuugacuucaauaagcaggccauuagacggcugaaaacagaagcgcagaugagcauccagcucauuaacaaggccguuaaugcucugaucaacgaucaacuuauuaugaagaaucaucugcgcgacaucaugggcaucccuuauugcaacuacucuaaauauugguaccucaaucacaccgugacagggaagaccucccugcccagauguuggcuggucagcaacggaucuuaccucaaugaaacgcacuucagcgacgauauugagcagcaggccgacaacaugaucacagagcugcuucaaaaagaauauauggaucggcagggcaagaccccucuggggcucguggaccuguuuguguucuccaccucuuuuuaccugauuagcaucuuccuucaccucguccgcauuccgugaggacuaguaauaaggaaacuguaugaaugucugugggcaggaagugaagagauccuucuguaaagguuuuuggaauuaugucugcugaauaauaaacuuuuuugaaauaauaaaucugguagaaaaaugagaucuaaaaaaaaaaaaaaaaaaaaaaaaaaaaaaaaaaaaaaaaaaaaaaaaaaaaaaaaaaaaaaaaaaaaaaaaaaaaaaaaaaaaaaaaaaaaaaaaaaaa

SEQ ID NO: 42898 - RNA, 1671 nt, Artificial Sequence
  mRNA product Design b-4 (A100) comprising derived and/or modified sequence from LASV(Lassa virus/H.sapiens-wt/NGA/2018/ISTH_0959;Clade II)__AVV65099__GPCmut13 (opt5)
aggagagucccgcagucggcguccagcggcucugcuuguucgugugugugucguugcaggccuuauucaagcuuaccaugggccagaucauuaccuucuuucaagaggugccccacgucaucgaagagguuaugaacauugugcugaucgcccucagccugcuugcuauucugaaggggaucuacaauguggucacaugcggacucuucggccugguguccuuucuucugcucugugggagaucuugcagcacgaccuauaaaggaguuuacgaacugcagacacuggagcucgacauggccucccugaacaugaccaugccucuuucuuguacaaagaauaacagccaucacuauaucauggugggcaaugaaaccgggcuggagcucacacugaccaacacguccauuaucaaucauaaauucugcaaccuuucugaugcgcacaagaaaaaucuguacgaccaugcucucaugagcauuaucuccaccuuucaccugagcauuccgaacuucaaucaguaugaggccaugucuugugauuuuaacggaggcaagaucuccguccaguacaaucugagccacgccuaugcuauugacgccgcuaaccauugcggcacaaucgccaauggggugcuccaaaccuucaugcggauggcguggggaggcucuuacaucgcccuggauuccgggaagggaagcugggacuguauuaugacaucuuaccaguaucuuaucauucagaacaccacgugggaagaucacugccaguuuucccgccccagcccuaucggcuaccuggggcuccugucccaaagaacacgggacauuuauaucucucgcagacuucugggaaccuucacauggacccucagcgauuccgagggcaacgaaacccccggcggguacugucugacacgguggaugcugaucgaggcugagcucaaaugcuuuggaaauacggccguugcuaaguguaacgaaaaacaugacgaggaguucugcgauaugcugcgccuuuuugacuucaauaagcaggccauuagacggcugaaaaccgaagcgcagaugagcauccagcucauuaacaaggccgugaaugcucugaucaacgaucaacuuauuaugaagaaucaucugcgcgacaucaugggcaucccuuauugcaacuacucuaaauauugguaccucaaucacacagucaccgggaagacaucccugcccagauguuggcuggugagcaacggaucuuaccucaaugaaacccacuucagcgacgauauugagcagcaggccgacaacaugaucacggagcugcuucaaaaagaauauauugaucggcagggcaagacaccucuggggcucguggaccuguuugucuucuccaccucuuuuuaccugaucagcauuuuccuucaccucguuaaaaucccgugaggacuaguaauaaggaaacuguaugaaugucugugggcaggaagugaagagauccuucuguaaagguuuuuggaauuaugucugcugaauaauaaacuuuuuugaaauaauaaaucugguagaaaaaugagaucuaaaaaaaaaaaaaaaaaaaaaaaaaaaaaaaaaaaaaaaaaaaaaaaaaaaaaaaaaaaaaaaaaaaaaaaaaaaaaaaaaaaaaaaaaaaaaaaaaaaa

SEQ ID NO: 42899 - RNA, 1671 nt, Artificial Sequence
  mRNA product Design b-4 (A100) comprising derived and/or modified sequence from LASV(LASV003-NIG-2008;Clade II)__AIT17580__GPCmut13 (opt5)
aggagagucccgcagucggcguccagcggcucugcuuguucgugugugugucguugcaggccuuauucaagcuuaccaugggccagaucauuaccuucuuucaagaggugccccacgucaucgaagagguuaugaacauugugcugaucgcccucagccugcuugcuauucugaaggggaucuacaauguggccacaugcggacucuucggccuggucuccuuucuucugcucugugggagaucuugcagcacgaccuauaaaggaguguacgaacugcagacacuggagcucgacauggcgucccugaacaugaccaugccucuuucuuguacaaagaauaacagccaucacuauaucaugguuggcaaugaaaccgggcuggagcucacacugaccaacacguccauuaucaaucauaaauucugcaaccuuucugaugcucacaagaaaaaucuguacgaccaugcccucaugagcauuaucuccaccuuucaccugagcauuccgaacuucaaucaguaugaggccaugucuugugauuuuaacggaggcaagaucuccgugcaguacaaucugagccacacauaugcugucgacgccgcuaaccauugcggcaccauugccaauggggugcuccaaacauucaugcggauggcguggggaggcucuuacaucgcccuggauuccgggaagggaagcugggacuguaucaugaccucuuaccaguaucuuauuauccagaacacgacaugggaagaucacugccaguuuucccgccccagcccuauuggcuaccuggggcuccugucccaaagaacccgggacaucuauauuucucgcagacuucugggaacauucaccuggacccucagcgauuccgagagcaacgaaacacccggcggcuacugucugacgcgguggaugcugaucgaggcugagcucaaaugcuuugggaauaccgccguugcuaaguguaacgaaaaacaugacgaggaguucugcgauaugcugcgccuuuuugacuucaauaagcaggccaucagacggcugaaagcggaagcccagaugucuauucagcucaucaacaaggcugugaaugcccugauuaacgaucaacuuaucaugaagaaucaucugcgcgacauuaugggaaucccuuauugcaacuacuccaaauauugguaccucaaucacacagucaccggcagaacaagccugccccgguguuggcuggugucuaacgggagcuaccucaaugaaacccacuucuccgacgauaucgagcagcaggcugacaacaugauuacggagcugcuucaaaaggaauauauggaucgccagggaaaaacaccucugggccucguggaccuguuugucuucucuaccagcuuuuaccugaucuccauuuuccuucaccucguuaagaucccgugaggacuaguaauaaggaaacuguaugaaugucugugggcaggaagugaagagauccuucuguaaagguuuuuggaauuaugucugcugaauaauaaacuuuuuugaaauaauaaaucugguagaaaaaugagaucuaaaaaaaaaaaaaaaaaaaaaaaaaaaaaaaaaaaaaaaaaaaaaaaaaaaaaaaaaaaaaaaaaaaaaaaaaaaaaaaaaaaaaaaaaaaaaaaaaaaa

SEQ ID NO: 42900 - RNA, 1671 nt, Artificial Sequence
  mRNA product Design b-4 (A100) comprising derived and/or modified sequence from LASV(LASV035-NIG-2009;Clade II)__AIT17588__GPCmut13 (opt5)
aggagagucccgcagucggcguccagcggcucugcuuguucgugugugugucguugcaggccuuauucaagcuuaccaugggccagaucauuaccuucuuucaagaggugccccacgucaucgaagagguuaugaacauugugcugaucgcccucagccugcuugcuauucugaaggggaucuacaauguggccacaugcggacucuucggccuggucuccuuucuucugcucugugggagaucuugcagcacgaccuauaaaggaguguacgaacugcagacacuggagcucgacauggcgucccugaacaugaccaugccucuuucuuguacaaagaauaacagccaucacuauaucaugguuggcaaugaaaccgggcuggagcucacacugaccaacacguccauuaucaaucauaaauucugcaaccuuucugaugcucacaagaaaaaucuguacgaccaugcccucaugagcauuaucuccaccuuucaccugagcauuccgaacuucaaucaguaugaggccaugucuugugauuuuaacggaggcaagaucuccgugcaguacaaucugagccacgcuuaugccgucgacgcugccaaccauugcggcacaauugcgaauggggugcuccaaaccuucaugcggauggccuggggaggcucuuacaucgcucuggauuccgggaagggaagcugggacuguaucaugacaucuuaccaguaucuuauuauccagaacaccacgugggaagaucacugccaguuuucccgccccagcccuauuggcuaccuggggcuccugucccaaagaacacgggacaucuauauuucucgcagacuucugggaaccuucacauggacccucagcgauuccgagggcaacgaaacccccggcggguacugucugacacgguggaugcugaucgaggccgagcucaaaugcuuuggaaauacggcuguugccaaguguaacgaaaaacaugacgaggaguucugcgauaugcugcgccuuuuugacuucaauaagcaggcgaucagacggcugaaagccgaagcucagaugagcauucagcucaucaacaaggccgugaaugcucugauuaacgaucaacuuaucaugaagaaucaucugcgcgacauuaugggcaucccuuauugcaacuacucuaaauauugguaccucaaucacaccgucacagggaagaccucccugcccagauguuggcuggugagcaacggaucuuaccucaaugaaacacacuucagcgacgauaucgagcagcaggccgacaacaugauuaccgagcugcuucaaaaagaauauaucgaucggcagggcaagacgccucuggggcucguggaccuguuugucuucuccacaucuuuuuaccugauuagcaucuuccuucaccucguuaaaauuccgugaggacuaguaauaaggaaacuguaugaaugucugugggcaggaagugaagagauccuucuguaaagguuuuuggaauuaugucugcugaauaauaaacuuuuuugaaauaauaaaucugguagaaaaaugagaucuaaaaaaaaaaaaaaaaaaaaaaaaaaaaaaaaaaaaaaaaaaaaaaaaaaaaaaaaaaaaaaaaaaaaaaaaaaaaaaaaaaaaaaaaaaaaaaaaaaaa

SEQ ID NO: 42901 - RNA, 1671 nt, Artificial Sequence
  mRNA product Design b-4 (A100) comprising derived and/or modified sequence from LASV(LASV1000-NIG-2009;Clade II)__AIT17782__GPCmut13 (opt5)
aggagagucccgcagucggcguccagcggcucugcuuguucgugugugugucguugcaggccuuauucaagcuuaccaugggccagaucauuaccuucuuucaagaggugccccacgucaucgaagagguuaugaacauugugcugaucgcccucagccugcuugcuauucugaaggggaucuacaauguggccacaugcggacucuucggccuggucuccuuucuucugcucugugggagaucuugcagcacgaccuauaaaggaguguacgaacugcagacacuggagcucgacauggcgucccugaacaugaccaugccucuuucuuguacaaagaauaacagccaucacuauaucaugguuggcaaugaaaccgggcuggagcucacacugaccaacacguccauuaucaaucauaaauucugcaaccuuucugaugcucacaagaaaaaucuguacgaccaugcccucaugagcauuaucuccaccuuucaccugagcauuccgaacuucaaucaguaugaggccaugucuugugauuuuaacggaggcaagaucuccgugcaguacaaucugagccacacauaugcugucgacgccgcuaaccauugcggcaccauugccaauggggugcuccaaacauucaugcggauggcguggggaggcucuuacaucgcccuggauuccgggaagggaagcugggacuguaucaugaccucuuaccaguaucuuauuauccagaacacgacaugggaagaucacugccaguuuucccgccccagcccuauuggcuaccuggggcuccugucccaaagaacccgggacaucuauauuucucgcagacuucugggaacauucaccuggacccucagcgauuccgagggcaacgaaacacccggcggguacugucugacgcgguggaugcugaucgaggcugagcucaaaugcuuuggaaauaccgccguugcuaaguguaacgaaaaacaugacgaggaguucugcgauaugcugcgccuuuuugacuucaauaagcaggccaucaaaagacugaagacagaagcgcagaugagcauucagcucaucaacaaggccgugaaugcucugauuaacgaucaacuuaucaugaaaaaucaucugcgggacauuaugggcaucccuuauugcaacuacucuaaguauugguaccucaaucacaccgucacagggaaaaccucccugccccgcuguuggcuggugagcaacggaucuuaccucaaugaaacgcacuucagcgacgauaucgagcagcaggccgacaacaugauuacagagcugcuucaaaaggaauauaucgauagacagggcaaaaccccucuggggcucguggaccuguuugucuucuccaccucuuuuuaccugauuagcaucuuccuucaccucguuaagauuccgugaggacuaguaauaaggaaacuguaugaaugucugugggcaggaagugaagagauccuucuguaaagguuuuuggaauuaugucugcugaauaauaaacuuuuuugaaauaauaaaucugguagaaaaaugagaucuaaaaaaaaaaaaaaaaaaaaaaaaaaaaaaaaaaaaaaaaaaaaaaaaaaaaaaaaaaaaaaaaaaaaaaaaaaaaaaaaaaaaaaaaaaaaaaaaaaaa

SEQ ID NO: 42902 - RNA, 1671 nt, Artificial Sequence
  mRNA product Design b-4 (A100) comprising derived and/or modified sequence from LASV(LASV221-NIG-2010;Clade II)__AIT17624__GPCmut13 (opt5)
aggagagucccgcagucggcguccagcggcucugcuuguucgugugugugucguugcaggccuuauucaagcuuaccaugggccagaucauuaccuucuuucaagaggugccccacgucaucgaagagguuaugaacauugugcugaucgcccucagccugcuugcuauucugaaggggaucuacaauguggccacaugcggacucuucggccuggucuccuuucuucugcucugugggagaucuugcagcacgaccuauaaaggaguguacgaacugcagacacuggagcucgacauggcgucccugaacaugaccaugccucuuucuuguacaaagaauaacagccaucacuauaucaugguuggcaaugaaaccgggcuggagcucacacugaccaacacguccauuaucaaucauaaauucugcaaccuuucugaugcucacaagaaaaaucuguacgaccaugcccucaugagcauuaucuccaccuuucaccugagcauuccgaacuucaaucaguaugaggccaugucuugugauuuuaacggaggcaagaucuccgugcaguacaaucugagccacacauaugcuauugacgccgcuaaccauugcggcaccaucgccaaugggguccuccaaacauucaugcggauggcguggggaggcucuuacaucgcccuggauuccgggaagggaagcugggacuguauuaugaccucuuaccaguaucuuaucauucagaacacgacaugggaagaucacugccaguuuucccgccccagcccuaucggcuaccuggggcuccugucccaaagaacccgggacauuuauaucucucgcagacuucugggaacauucaccuggacccucagcgauuccgagggcaacgaaacacccggcggguacugucugacgcgguggaugcugaucgaggcugagcucaaaugcuuuggaaauaccgccguggcuaaguguaacgaaaaacaugacgaggaguucugcgauaugcugcgccuuuuugacuucaauaagcaggccauuagacggcugaaaacagaagcgcagaugagcauccagcucauuaacaaggccguuaaugcucugaucaacgaucaacuuauuaugaagaaucaucugcgcgacaucaugggcaucccuuauugcaacuacucuaaauauugguaccucaaucacaccgugacagggaagaccucccugcccagauguuggcuggucagcaacggaucuuaccucaaugaaacgcacuucagcgacgauauugagcagcaggccgacaacaugaucacagagaugcugcaaaaagaauauauggaucggcagggcaagaccccucuugggcugguggaccucuuuguguucuccaccucuuuuuaccugauuagcaucuuccugcaccuugucaaaauuccgugaggacuaguaauaaggaaacuguaugaaugucugugggcaggaagugaagagauccuucuguaaagguuuuuggaauuaugucugcugaauaauaaacuuuuuugaaauaauaaaucugguagaaaaaugagaucuaaaaaaaaaaaaaaaaaaaaaaaaaaaaaaaaaaaaaaaaaaaaaaaaaaaaaaaaaaaaaaaaaaaaaaaaaaaaaaaaaaaaaaaaaaaaaaaaaaaa

SEQ ID NO: 42903 - RNA, 1671 nt, Artificial Sequence
  mRNA product Design b-4 (A100) comprising derived and/or modified sequence from LASV(LASV237-NIG-2010;Clade II)__AIT17638__GPCmut13 (opt5)
aggagagucccgcagucggcguccagcggcucugcuuguucgugugugugucguugcaggccuuauucaagcuuaccaugggccagaucauuaccuucuuucaagaggugccccacgucaucgaagagguuaugaacauugugcugaucgcccucagccugcuugcuauucugaaggggaucuacaauguggccacaugcggacucuucggccuggucuccuuucuucugcucugugggagaucuugcagcacgaccuauaaaggaguguacgaacugcagacacuggagcucgacauggcgucccugaacaugaccaugccucuuucuuguacaaagaauaacagccaucacuauaucaugguuggcaaugaaaccgggcuggagcucacacugaccaacacguccauuaucaaucauaaauucugcaaccuuucugaugcucacaagaaagaccuguacgaucaugcccucaugagcauuaucuccaccuuucaccugagcauuccgaauuucaaccaguaugaggccaugucuugugacuuuaauggaggcaagaucuccgugcaguacaaccugagccacacauaugcugucgaugccgcuaaucauugcggcaccauugccaacggggugcuccaaacauucaugcggauggcguggggaggcucuuacaucgcccuggacuccgggaagggaagcugggauuguaucaugaccucuuaccaguaucuuauuauccagaauacgacaugggaagaccacugccaguuuucccgccccagcccuauuggcuaccuggggcuccugucccaaagaacccgggauaucuauauuucucgcagacuucugggaacauucaccuggacccucagcgacuccgagggcaacgaaacacccggcggguacugucugacgcgguggaugcugaucgaggcugagcucaaaugcuuuggaaacaccgccguugcuaaguguaaugaaaaacaugaugaggaguucugcgacaugcugcgccuuuuugauuucaacaagcaggccaucagacggcugaaaacagaagcgcagaugagcauucagcucaucaauaaggccgugaacgcucugauuaaugaccaacuuaucaugaagaaccaucugcgcgacauuaugggcaucccuuauugcaauuacucuaaauauugguaccucaaccacaccgucacagggaagaccucccugcccagauguuggcuggugagcaauggaucuuaccucaacgaaacgcacuucagcgaugacaucgagcagcaggccgauaauaugauuacagagcugcuucaaaaagaauauauggaccggcagggcaagaccccucuggggcucguggaucuguuugucuucuccaccucuuuuuaccugaucagcauuuuccuucaccucaucaaaauuccgugaggacuaguaauaaggaaacuguaugaaugucugugggcaggaagugaagagauccuucuguaaagguuuuuggaauuaugucugcugaauaauaaacuuuuuugaaauaauaaaucugguagaaaaaugagaucuaaaaaaaaaaaaaaaaaaaaaaaaaaaaaaaaaaaaaaaaaaaaaaaaaaaaaaaaaaaaaaaaaaaaaaaaaaaaaaaaaaaaaaaaaaaaaaaaaaaa

SEQ ID NO: 42904 - RNA, 1671 nt, Artificial Sequence
  mRNA product Design b-4 (A100) comprising derived and/or modified sequence from LASV(LASV253-NIG-2011;Clade II)__AIT17670__GPCmut13 (opt5)
aggagagucccgcagucggcguccagcggcucugcuuguucgugugugugucguugcaggccuuauucaagcuuaccaugggccagaucauuaccuucuuucaagaggugccccacgucaucgaagagguuaugaacauugugcugaucgcccucagccugcuugcuauucugaaggggaucuacaauguggccacaugcggacucuucggccuggucuccuuucuucugcucugugggagaucuugcagcacgaccuauaaaggaguguacgaacugcagacacuggagcucgacauggcgucccugaacaugaccaugccucuuucuuguacaaagaauaacagccaucacuauaucaugguuggcaaugaaaccgggcuggagcucacacugaccaacacguccauuaucaaucauaaauucugcaaccuuucugaugcucacaagaaaaaucuguacgaccaugcccucaugagcauuaucuccaccuuucaccugagcauuccgaacuucaaucaguaugaggccaugucuugugauuuuaacggaggcaagaucuccgugcaguacaaucugagccacacauaugcugucgacgccgcuaaccauugcggcaccauugccaauggggugcuccaaacauucaugcggauggcguggggaggcucuuacaucgcccuggauuccgggaagggaagcugggacuguaucaugaccucuuaccaguaucuuauuauccagaacacgacaugggaagaucacugccaguuuucccgccccagcccuauuggcuaccuggggcuccugucccaaagaacccgggacaucuauauuucucgcagacuucugggaacauucaccuggacccucagcgauuccgagggcaacgaaacacccggcggguacugucugacgcgguggaugcugaucgaggcugagcucaaaugcuuuggaaauaccgccguugcuaaguguaacgaaaaacaugacgaggaguucugcgauaugcugcgccuuuuugacuucaauaagcaggccaucagacggcugaaagcggaagcccagaugagcauucagcucaucaacaaggcugugaaugcccugauuaacgaucaacuuaucaugaagaaucaucugcgcgacauuaugggcaucccuuauugcaacuacucuaaauauugguaccucaaucacacagucaccgggagaacaucccugccccgguguuggcuggugagcaacggaucuuaccucaaugaaacccacuucagcgacgauaucgagcagcaggcugacaacaugauuacggagcugcuucaaaaggaauauaucgaucgccagggcaaaacaccucuggggcucguggaccuguuugucuucuccaccucuuuuuaccugauuagcaucuuccuucaccucguuaagauuccgugaggacuaguaauaaggaaacuguaugaaugucugugggcaggaagugaagagauccuucuguaaagguuuuuggaauuaugucugcugaauaauaaacuuuuuugaaauaauaaaucugguagaaaaaugagaucuaaaaaaaaaaaaaaaaaaaaaaaaaaaaaaaaaaaaaaaaaaaaaaaaaaaaaaaaaaaaaaaaaaaaaaaaaaaaaaaaaaaaaaaaaaaaaaaaaaaa

SEQ ID NO: 42905 - RNA, 1671 nt, Artificial Sequence
  mRNA product Design b-4 (A100) comprising derived and/or modified sequence from LASV(LASV254-NIG-2011;Clade II)__AIT17674__GPCmut13 (opt5)
aggagagucccgcagucggcguccagcggcucugcuuguucgugugugugucguugcaggccuuauucaagcuuaccaugggccagaucauuaccuucuuucaagaggugccccacgucaucgaagagguuaugaacauugugcugaucgcccucagccugcuugcuauucugaaggggaucuacaauguggccacaugcggacucuucggccuggucuccuuucuucugcucugugggagaucuugcagcacgaccuauaaaggaguguacgaacugcagacacuggagcucgacaugaccaaccugaauaugacaaugccucuuuccuguaccaagaacaauucucaucacuauaucaugguuggcaacgaaacagggcuggagcucacccugacgaauaccagcauuaucaaccauaaauucugcaaucuuuccgaugcgcacaagaaaaaccuguacaaucaugcucucaugucuauuaucagcacauuucaccuguccauuccgaacuucaaucaguaugaggccaugagcugugacuuuaacggaggcaagaucucugugcaguacaaucugucccacagcuaugccgucgaugcugccaaccauugcggcaccauugcuaacggggugcuccaaacauucaugcggauggccuggggaggcucuuacaucgcgcuggacuccgggaagggaaauugggauuguaucaugaccagcuaccaguaucuuauuauccagaacacgacaugggaagaccacugccaguuuucucgccccuccccuauuggcuaccuggggcuccugagccaaagaacccgggauaucuauauuucccgcagacuucugggaacauucaccuggacccucucugacagcgagggcaaugaaacacccggcggguacugucugacgcgguggaugcugaucgaggccgagcucaaaugcuuuggaaacaccgcuguugccaaguguaaugaaaaacaugaugaggaguucugcgacaugcugcgccuuuuugauuucaacaagcaggcuaucagacggcugaaaacagaagcccaggcgaauauucagcucaucaacaaggccgugaaugcucugauuaacgaccaacuuaucaugaagaaucaucugcgcgauauuaugggcaucccuuauugcaacuacuccaaauauugguaccucaaucacaccgucacagggaagaccagccugcccagauguuggcuggugucuaacggauccuaccucaaugaaacgcacuucagcgacgacaucgagcagcaggccgauaacaugauuacagagcugcuucaaaaagaauauauggaccggcagggcaagaccccucuggggcucguggaucuguuugucuucucuaccagcuuuuaccugaucuccauuuuccuucaccucguuaaaaucccgugaggacuaguaauaaggaaacuguaugaaugucugugggcaggaagugaagagauccuucuguaaagguuuuuggaauuaugucugcugaauaauaaacuuuuuugaaauaauaaaucugguagaaaaaugagaucuaaaaaaaaaaaaaaaaaaaaaaaaaaaaaaaaaaaaaaaaaaaaaaaaaaaaaaaaaaaaaaaaaaaaaaaaaaaaaaaaaaaaaaaaaaaaaaaaaaaa

SEQ ID NO: 42906 - RNA, 1671 nt, Artificial Sequence
  mRNA product Design b-4 (A100) comprising derived and/or modified sequence from LASV(Nig08-A19;Clade III)__ADU56618__GPCmut13 (opt5)
aggagagucccgcagucggcguccagcggcucugcuuguucgugugugugucguugcaggccuuauucaagcuuaccaugggccagaucgugaccuucuuucaagaggucccccacguuauugaagaggugaugaacaucgugcugauugcccucagcauccuggcuauucuuaaggggcuguacaauaucgccacaugcggacucaucggccuggucacguuccuucugcucuccgggagaucuuguagcaugaccuauaaaggaguguacgaacugcagacacuggagcucaacaugaauacccugaacaugacaaugccucuuuccugcaccaagaauaacucucaucacuauauuaugguuggcaaugaaacagggcuggagcucacccugacgaacaccagccuucugcaucacaaauuuuguaaucucuccgacgcgcauaagaaaaaccuguacgaucacacacugaugucuaucauuagcaccuuccaccucuccaucccgaauuuuaaccaguaugaggcuaugagcugcgacuucaauggaggcaagauuacagugcaguacaaccugucucauuccuaugccaucgaugccgcuaaucacuguggcaccgucgccaacggggugcuucaaacguuuaugcggauggcuuggggaggcagcuacauugcccuggacucugggcgcggaaagugggauugcaucaugacauccuaccaguaucucaucauucagaacaccacaugggaagaccauugucaguucagcagacccucuccuaucggcuaccuggggcuucugucccaacggacccgcgauauuuauaucagcagacggcuccugggaaccuuuacauggacgcuguccgacucugagggcaaugaaacccccggcggguacugccucacacgcuggaugcugauugaggcggagcuuaaauguuucggaaacaccgccguugcuaagugcaaugaaaaacacgaugaggaauuuugugacaugcugagacucuucgauuuuaacaagcaggccauccggcgccugaaagcugaggcccagaugagcauccagcuuauuaauaaggcggugaacgcccugaucaaugaccaacucauuaugaagaaccaccugagagauaucaugggcauuccuuauugcaauuacuccaaauauugguaccugaaccauacaagcaccgggcggacgucucucccccgcugcuggcuggucuccaauggaagcuaccuuaacgaaacacacuucucugacgacaucgagcagcaggcugauaauaugaucaccgagaugcugcaaaaggaauaucucgacagacagggcaaaaccccucuggggcugguggaucuuuucguguuuagcacauccuucuaccucauuucuaucuuucugcaucuggucaagauuccgugaggacuaguaauaaggaaacuguaugaaugucugugggcaggaagugaagagauccuucuguaaagguuuuuggaauuaugucugcugaauaauaaacuuuuuugaaauaauaaaucugguagaaaaaugagaucuaaaaaaaaaaaaaaaaaaaaaaaaaaaaaaaaaaaaaaaaaaaaaaaaaaaaaaaaaaaaaaaaaaaaaaaaaaaaaaaaaaaaaaaaaaaaaaaaaaaa

SEQ ID NO: 42907 - RNA, 1674 nt, Artificial Sequence
  mRNA product Design b-4 (A100) comprising derived and/or modified sequence from LASV(G1180-SLE-2010;Clade IV)__AIT17168__GPCmut13 (opt5)
aggagagucccgcagucggcguccagcggcucugcuuguucgugugugugucguugcaggccuuauucaagcuuaccaugggccagaucgugaccuucuuucaagaggucccccacguuauugaagaggugaugaacaucgugcugauugcccucagcauccuggcuguccuuaaggggcuguacaauuucgccacaugcggacucgugggccugcuuacguuucugcuccugugugggagauccugcaccgcgucucgguauaaaggaguuuacgaacugcagacacucgagcugaacauggaaacccuuaauaugacaaugccucugagcuguaccaagaacaauucccaucacuauauuauggugggcaacgagacagggcucgagcugacccuuacgaauaccucuaucaucaaccauaaauucugcaaucugagcgacgcucacaagaaaaaccucuacgaucaugcccugauguccauuaucucuacauuucaccugagcauuccgaauuucaaccaguaugaagccauguccugugacuuuaauggaggcaagaucagcguccaguacaaccucucucacuccuaugcuggcgaugccgcuaaucauugcgggaccguggccaacggaguucugcaaacauucaugcgcauggcguggggcgggagcuacauugcccuugacucuggacacggcuccugggauuguaucaugaccagcuaccaguaucugauuauccagaacacgacaugggaggaccauugccaguuuucuagacccuccccuaucggguaccucggacugcuuagccaacggacccgcgauauuuauaucuccagacggcugcucggcacauucaccuggacccugucugacagcgaaggcaaggauacacccgggggauacugucugacgcgcuggaugcucauugaggcugagcugaaaugcuuuggcaauaccgccguggcuaaguguaacgaaaaacacgacgaggaguucugcgauaugcuuagacuguuugacuucaauaagcaggccauccagcggcucaaagcggaagcccagauguccauucaacugaucaacaaggcugucaaugcccuuaucaacgaucagcugauuaugaagaaucaccuccgcgacaucauggggauuccuuauugcaacuacagcaaauauugguaccugaaucauacaaccacaggaaagaccucucugcccaaauguuggcucguguccaacggcagcuaccugaaugaaacgcacuucucugacgauaucgagcagcaagcugacaacaugauuacagagaugcuucagaaggaauauauggagagacaggggaaaaccccucugggacucguggaucuguuugucuucagcaccuccuuuuaccugaucucuaucuuccuucaucucguuaagauuccgugaggacuaguaauaaggaaacuguaugaaugucugugggcaggaagugaagagauccuucuguaaagguuuuuggaauuaugucugcugaauaauaaacuuuuuugaaauaauaaaucugguagaaaaaugagaucuaaaaaaaaaaaaaaaaaaaaaaaaaaaaaaaaaaaaaaaaaaaaaaaaaaaaaaaaaaaaaaaaaaaaaaaaaaaaaaaaaaaaaaaaaaaaaaaaaaaa

SEQ ID NO: 42908 - RNA, 1674 nt, Artificial Sequence
  mRNA product Design b-4 (A100) comprising derived and/or modified sequence from LASV(G1442-SLE-2011;Clade IV)__AIT17180__GPCmut13 (opt5)
aggagagucccgcagucggcguccagcggcucugcuuguucgugugugugucguugcaggccuuauucaagcuuaccaugggccagaucgugaccuucuuucaagaggucccccacguuauugaagaggugaugaacaucgugcugauugcccucagcauccuggcuguccuuaaggggcuguacaauguggccacaugcggacucauuggccugguuacguuccuucugcucugugggagauccugcaccacaacccuguauaaaggaguguacgaacugcagacacucgagcugaacauggaaacccuuaauaugacaaugccucugucuuguaccaagaacaauagccaucacuauauccgggucggcaacgagacggggcucgagcugacccuuacaaauaccuccaucauuaaccauaaauuuugcaaucugucugacgcgcacaagaaaaaccucuacgaucaugcucugaugagcaucauuuccacauuccaccugucuaucccgaauuuuaaccaguaugaagccaugagcugugacuucaauggaggcaagauuuccgugcaguacaaccucagccacucuuaugccggcgaugcugccaaucauugcgggaccguugcuaacggagugcugcaaacguuuaugcgcauggccuggggcggguccuacaucgcgcuugacagcggaagaggcaacugggauuguauuaugacaucuuaccaguaucugaucauccagaauaccacaugggacgaucacugccaguucucccggcccagcccuauuggguaccucggacugcuuucucaacgcaccagagacgucuauaucucccggcgccugcucggcaccuuuacauggacgcugagcgauuccgagggcaaggacacccccgggggauacugucugacaagauggaugcucauugaagccgagcugaaaugcuucggcaacaccgcuguggccaaguguaaugagaaacaugaugaagaguuuugcgacaugcuucggcuguucgauuuuaacaagcaggcuauccagcgccucaaagccgaagcgcagaugucuauucaacugaucaauaaggccgugaacgcucuuaucaaugaccagcugauuaugaagaaccaccucagagacaucauggggauuccuuauugcaauuacagcaaauauugguaccugaacaauacagccaccggaaagacgucccugcccaaauguuggcucaucagcaacggcucuuaccugaaugagacacacuucuccgaugacauugaacaggaggcugauaacaugaucaccgagaugcuucaaaaggaauauauggagcggcaggggaaaaccccucugggacucgucgaccuguucguuuuuagcacaucuuucuaccugaucagcauuuuucuucaucucgugaagaucccgugaggacuaguaauaaggaaacuguaugaaugucugugggcaggaagugaagagauccuucuguaaagguuuuuggaauuaugucugcugaauaauaaacuuuuuugaaauaauaaaucugguagaaaaaugagaucuaaaaaaaaaaaaaaaaaaaaaaaaaaaaaaaaaaaaaaaaaaaaaaaaaaaaaaaaaaaaaaaaaaaaaaaaaaaaaaaaaaaaaaaaaaaaaaaaaaaa

SEQ ID NO: 42909 - RNA, 1674 nt, Artificial Sequence
  mRNA product Design b-4 (A100) comprising derived and/or modified sequence from LASV(G3010-SLE-2013;Clade IV)__AIT17344__GPCmut13 (opt5)
aggagagucccgcagucggcguccagcggcucugcuuguucgugugugugucguugcaggccuuauucaagcuuaccaugggccagaucgugaccuucuuucaagaggucccccacguuauugaagaggugaugaacaucgugcugauugcccucagcauccuggcuguccuuaaggggcuguacaauuucgccacaugcggacucgugggccugguuacguuucuucugcucugugggagauccugcaccacaucucuguauaaaggaguguacgaacugcagacccucgagcugaacauggaaacacuuaauaugaccaugccucugagcuguacaaagaacaauucccaucacuauauuauggucggcaacgagaccgggcucgagcugacgcuuaccaauacaucuaucaucaaccauaaauucugcaaucugagcgacgcgcacaagaaaaaccucuacaaucaugcucugauguccauuaucucuaccuuucaccugagcauuccgaacuucaaucaguaugaagccauguccugugauuuuaacggaggcaagaucagcgugcaguacaaucucucucacuccuaugccggcgacgcugccagccauugcgggacaguugcuaacggagugcugcaaaccuucaugcggauggccuggggcgggucuuacauugcgcuugauuccggauacggcaagugggacuguaucaugacgagcuaucaguaccugauuauccagaacacaaccugggaggaucacugccaguuuucucgccccuccccuaucggguaucucggacugcuuagccaaagaacacgggacauuuacaucucccgcagacugcucggcaccuucaccuggacacugucugauagcgaaggcaaagacacgcccgggggauauugucugacccgguggaugcucauugaggccgagcugaagugcuuuggcaauacagcugucgccaaauguaacgaaaagcaugaugaggaguucugcgacaugcuucgccuguuugauuucaauaaacaggcuauccagagacucaagaccgaagcccagauguccauucaacugaucaacaaggcggugaaugcccuuaucaacgaccagcugauuaugaaaaaucaccuccgggauaucauggggauuccuuacugcaacuauagcaaguacugguaccugaaucacacaaccacgggaaaaacaucucugcccaaguguuggcucguguccaacggcagcuaucugaaugaaacccauuucucugacgacaucgagcagcaagcugauaacaugauuaccgagaugcuucagaaagaauacauggagcgccaggggaagacaccucugggacucgucgaccuguuuguuuucagcaccuccuuuuaucugaucucuaucuuccuucaccucgugaaaauuccgugaggacuaguaauaaggaaacuguaugaaugucugugggcaggaagugaagagauccuucuguaaagguuuuuggaauuaugucugcugaauaauaaacuuuuuugaaauaauaaaucugguagaaaaaugagaucuaaaaaaaaaaaaaaaaaaaaaaaaaaaaaaaaaaaaaaaaaaaaaaaaaaaaaaaaaaaaaaaaaaaaaaaaaaaaaaaaaaaaaaaaaaaaaaaaaaaa

SEQ ID NO: 42910 - RNA, 1674 nt, Artificial Sequence
  mRNA product Design b-4 (A100) comprising derived and/or modified sequence from LASV(G502-SLE-2009;Clade IV)__AIT17126__GPCmut13 (opt5)
aggagagucccgcagucggcguccagcggcucugcuuguucgugugugugucguugcaggccuuauucaagcuuaccaugggccagaucgugaccuucuuucaagaggucccccacguuauugaagaggugaugaacaucgugcugauugcccucagcauccuggcuguccuuaaggggcuguacaauuucgccacaugcggacucgugggccugcuuacguuucugcuccugugugggagauccugcaccacaggacuguauaaaggcguuuacgaacuccagacccuggagcuuaacauggaaacacugaauaugaccaugccucucucuuguacaaagaacaauagccaucacuauauuaugguggggaacgagaccggacuggagcuuacgcugaccaauacauccaucaucaaccauaaauucugcaaucucucugacgcgcacaagaaaaaccuguacgaucaugcucugaugagcauuaucuccaccuuucaccucucuauuccgaauuucaaccaguaugaagccaugagcugugacuuuaauggcggcaagaucuccguccaguacaaccugagccacucuuaugccggggaugcugccgaccauugcggaacaguggcuaauggcguucuucaaaccuucaugcggauggccuggggaggguccuacauugcgcuggauagcggccgcgggagaugggacuguaucaugacgucuuaccaguaucucauuauccagaacacaaccugggaggaucacugccaguuuucccggcccagcccuaucggauaccugggccuucugucucaacgcacaagagacauuuauaucucccggcgccuccugggcaccuucaccuggacacugagcgauuccgaagggaaggacacgcccggaggcuacugucucaccagauggaugcugauugaggccgagcuuaaaugcuuugggaacacagcuguggccaaguguaaugaaaaacaugaugaggaguucugcgacaugcugcggcucuuugauuucaacaagcaggcuauccagcgccugaaagccgaagcgcagaugucuauucaacuuaucaauaaggccgucaacgcucugaucaaugaccagcucgugaugaagaaccaccugagagacauuaugggaaucccuuauugcaauuacagccgguauugguaccugaaccacaccacaaccggccgcacgucccuccccaaauguuggcuggugagcaaugggucuuaccuuaacgaaacacauuucuccgaugacauugagcagcaagccgauaauaugaucaccgagaugcugcagaaggaauauauggagagacagggaaaaaccccucucggccuggucgaccuguuuguuuucagcacaucuuuuuaccuuauuagcaucuuccuccaccuggugaagaucccgugaggacuaguaauaaggaaacuguaugaaugucugugggcaggaagugaagagauccuucuguaaagguuuuuggaauuaugucugcugaauaauaaacuuuuuugaaauaauaaaucugguagaaaaaugagaucuaaaaaaaaaaaaaaaaaaaaaaaaaaaaaaaaaaaaaaaaaaaaaaaaaaaaaaaaaaaaaaaaaaaaaaaaaaaaaaaaaaaaaaaaaaaaaaaaaaaa

SEQ ID NO: 42911 - RNA, 1674 nt, Artificial Sequence
  mRNA product Design b-4 (A100) comprising derived and/or modified sequence from LASV(G733-SLE-2010;Clade IV)__AIT17154__GPCmut13 (opt5)
aggagagucccgcagucggcguccagcggcucugcuuguucgugugugugucguugcaggccuuauucaagcuuaccaugggccagaucgugaccuucuuucaagaggucccccacguuauugaagaggugaugaacaucgugcugauugcccucagcauccuggcuguccuuaaggggcuguacaauuucgccacaugcggaauugugggccucguuuccuuucugcuucugugugggagaucuugcacgaccagccucuauaaaggaguguacgaacugcagacacuggagcucaacauggaaacccugaauaugacaaugccucuuuccuguaccaagaacaauucucaucacuauaucauggucggcaacgagacagggcuggagcucacccugacgaauaccagcaucauuaaccauaaauucugcaaucuuuccgacgcgcacaagaaaaaccuguacgaucaugcucucaugucuaucauuagcacauuucaccuguccaucccgaauuucaaccaguaugaagccaugagcugugacuuuaauggaggcaagauuucugugcaguacaaccugucccacagcuaugccggcgaugcugccaaucauugcgggaccaucgcuaacggaguucuccaaacauucaugcggauggccuggggcgggucuuacauugcgcuggacuccggacgcgauagaugggacuguaucaugaccagcuaccaguaucuuaucauucagaacacgacaugggaggaucacugccaguuuucucggcccuccccuaucggcuaccuggggcuccugagccaacgcaccagagacauuuauaucucccggcgccuucugggaacauucaccuggacccucucugauagcgaaggcaaggacacacccggcggguacugucugacgagauggaugcugauugaggccgagcucaaaugcuuuggaaauaccgcuguggccaaguguaacgaaaaacaugaugaggaguucugcgacaugcugcggcuuuuugauuucaauaagcaggcuauccagcgccugaaagccgaagcgcagauguccauccaacucauuaacaaggccgucaaugcucugaucaacgaccagcuuauuaugaagaaucaccugagagacaucaugggcauuccuuauugcaacuacagcaaauauugguaccucaaucacacaaccacagggaagaccucucugcccaaauguuggcugguguccaacggaagcuaccucaaugaaacgcauuucucugaugacaucgagcagcaagccgauaacaugaucacagagaugcugcagaaggaauauauggagcggcagggcaaaaccccucuugggcugguggaccucuuugucuucagcaccuccuuuuaccugauuucuaucuuccugcaccuuguuaagauuccgugaggacuaguaauaaggaaacuguaugaaugucugugggcaggaagugaagagauccuucuguaaagguuuuuggaauuaugucugcugaauaauaaacuuuuuugaaauaauaaaucugguagaaaaaugagaucuaaaaaaaaaaaaaaaaaaaaaaaaaaaaaaaaaaaaaaaaaaaaaaaaaaaaaaaaaaaaaaaaaaaaaaaaaaaaaaaaaaaaaaaaaaaaaaaaaaaa

SEQ ID NO: 42912 - RNA, 1674 nt, Artificial Sequence
  mRNA product Design b-4 (A100) comprising derived and/or modified sequence from MOPV/LASV reassortant(IGS-1;Clade IV)__AFY05576__GPCmut13 (opt5)
aggagagucccgcagucggcguccagcggcucugcuuguucgugugugugucguugcaggccuuauucaagcuuaccaugggccagaucgugaccuucuuucaagaggucccccacguuauugaagaggugaugaacaucgugcugauugcccucagcguccuggcugugcuuaaggggcuguacaauuucgccacaugcggacucguuggccuggugacguuucuucugcucugugggagauccugcaccacaucucuguauaaaggagucuacgaacugcagacccucgagcugaacauggaaacacuuaauaugaccaugccucugagcuguacaaagaacaauucccaucacuauaucauggugggcaacgagaccgggcucgagcugacgcuuaccaauacaucuauuaucaaccauaaauucugcaaucugagcgacgcgcacaagaaaaaccucuacgaucaugcucugauguccaucauuucuaccuuucaccugagcaucccgaauuucaaccaguaugaagccauguccugugacuuuaauggaggcaagauuagcguucaguacaaccucucucacuccuaugccggcgaugcugccaaucauugcgggacaguggcuaacggaguccugcaaaccuucaugcggauggccuggggcgggagcuacaucgcgcuugacucuggacgcggcaacugggauuguauuaugacguccuaccaguaucugaucauucagaauacaaccugggaggaccacugccaguuuagcagacccucuccuaucggguaccucggacugcuuucccaacggacacgcgauaucuauauuagcagacggcugcucggcaccuucaccuggacacuguccgacucugaaggcgaggauacgcccgggggauacugucugacccgcuggaugcucaucgaggccgaacugaagugcuuuggcaacacagcuguggccaaauguaaugagaagcaugacgaagaguucugcgauaugcuuagacuguuugacuucaacaaacaggcuauucagcggcucaaggccgaagcgcagaugagcauccaacugauuaauaaagccgugaacgcucuuaucaaugaucagcugaucaugaagaaccaccuccgcgacauuauggggaucccuuauugcaauuacuccaaguauugguaccugaaccacaccacaaccggaagaacgagccugcccaaauguuggcucgucucuaauggcuccuaccugaacgagacacauuucagcgacgauauugagcagcaagccgacaauaugaucaccgaaaugcuucagaaggaguauauggaacggcaggggaaaaccccucugggacucguugaucuguuuguguucucuaccagcuuuuaccugauuuccaucuuccuucaccucgugaagaucccgugaggacuaguaauaaggaaacuguaugaaugucugugggcaggaagugaagagauccuucuguaaagguuuuuggaauuaugucugcugaauaauaaacuuuuuugaaauaauaaaucugguagaaaaaugagaucuaaaaaaaaaaaaaaaaaaaaaaaaaaaaaaaaaaaaaaaaaaaaaaaaaaaaaaaaaaaaaaaaaaaaaaaaaaaaaaaaaaaaaaaaaaaaaaaaaaaa

SEQ ID NO: 42913 - RNA, 1674 nt, Artificial Sequence
  mRNA product Design b-4 (A100) comprising derived and/or modified sequence from LASV(LM765-SLE-2012;Clade IV)__AIT17814__GPCmut13 (opt5)
aggagagucccgcagucggcguccagcggcucugcuuguucgugugugugucguugcaggccuuauucaagcuuaccaugggccagaucgugaccuucuuucaagaggucccccacguuauugaagaggugaugaacaucgugcugauugcccucagcauccuggcuguccuuaaggggcuguacaauuucgccacaugcggacucgugggccugguuacguuucuucugcucugugggagauccugcaccacaucucuguauaaaggaguguacgaacugcagacccucgagcugaacauggaaacacuuaauaugaccaugccucugagcuguacaaagaacaauucccaucacuauauuauggucggcaacgagaccgggcucgagcugacgcuuaccaauacaucuaucaucgaccauaaauucugcaaccugagcgaugcgcaccggaagaaucucuacgaccaugcucugauguccauuaucucuaccuuucaccugagcauuccgaacuucaaucaguaugaagccauguccugugauuuuaacggaggcaaaaucagcgugcaguacaaucucucucacuccuaugccaaggacgcugccgaucauugcggcacaguugcuaacggggugcugcaaaccuucaugcgcauggccuggggaggcagcuacauugcgcuugacucugggagaggacggugggauuguaucaugacguccuaccaguaucugauuauccagaauacaaccugggaggaccacugccaguuuagccgccccucuccuaucggcuaccucgggcugcuuucccaaagaacacgggauauuuauaucagccgcagacugcucggaaccuucaccuggacacuguccgacucugaaggcaaggauacgcccggcggguacugucugacccgguggaugcucauugaggccgagcugaaaugcuuuggaaacacagcugucgccaaguguaacgaaaaacaugacgaggaguucugcgauaugcuucgccuguuugacuucaauaagcaggcuauccagagacucaaagccgaagcgcagaugagcauucaacugaucaacaaggccgugaaugcucuuaucaacgaccagcugauuaugaagaaucaccuccgggauaucaugggcauuccuuauugcaacuacuccaaauauugguaccugaaucacaccacaaccgggaagacgagccugcccaaauguuggcucgugucuaacggauccuaccugaaugaaacacauuucagcgacgauaucgagcagcaagccgacaacaugauuaccgagaugcuucagaaggaauauauggagcgccagggcaaaaccccucuggggcucgucgaucuguuuguuuucucuaccagcuuuuaccugaucuccaucuuccuucaccucgugaagauuccgugaggacuaguaauaaggaaacuguaugaaugucugugggcaggaagugaagagauccuucuguaaagguuuuuggaauuaugucugcugaauaauaaacuuuuuugaaauaauaaaucugguagaaaaaugagaucuaaaaaaaaaaaaaaaaaaaaaaaaaaaaaaaaaaaaaaaaaaaaaaaaaaaaaaaaaaaaaaaaaaaaaaaaaaaaaaaaaaaaaaaaaaaaaaaaaaaa

SEQ ID NO: 42914 - RNA, 1674 nt, Artificial Sequence
  mRNA product Design b-4 (A100) comprising derived and/or modified sequence from LASV(LM776-SLE-2012;Clade IV)__AIT17824__GPCmut13 (opt5)
aggagagucccgcagucggcguccagcggcucugcuuguucgugugugugucguugcaggccuuauucaagcuuaccaugggccagaucgugaccuucuuucaagaggucccccacguuauugaagaggugaugaacaucgugcugauugcccucagcauccuggcuguccuuaaggggcuguacaauuucgccacaugcggacucgugggccugguuacguuucuucugcucugugggagauccugcaccacaucuguguauaaaggagucuacgaacugcagacccuggagcucaacauggaaacacugaauaugaccaugccucuuagcuguacaaagaacaauucccaucacuauauuauggugggcaacgagaccgggcuggagcucacgcugaccaauacaucuaucaucaaccauaaauucugcaaucuuagcgacgcgcacaagaaaaaccuguacgaucaugcucucauguccauuaucucuaccuuucaccugagcauuccgaauuucaaccaguaugaagccauguccugugacuuuaauggaggcaagaucagcguucaguacaaccugucucacuccuaugccggcgaugcugccaaucauugcgggacaguggcuaacggaguccuccaaaccuucaugcggauggccuggggcgggagcuacauugcgcuggacucuggacacggcaagugggauuguaucaugacguccuaccaguaucuuauuauccagaacacaaccugggaggaccauugccaguuuagccgccccucuccuaucggguaccugggacuccugucccaaagaacacgggauauuuauaucagccgcagacuucugggcaccuucaccuggacacucuccgacucugaaggcaaagauacgcccgggggauacugucugacccgguggaugcugauugaggccgagcucaagugcuuuggcaauacagcuguggccaaauguaacgaaaagcacgacgaggaguucugcgauaugcugcgccuuuuugacuucaauaaacaggcuauccagagacugaaggccgaagcgcagaugagcauucaacucaucaacaaggccgugaaugcucugaucaacgaucagcuuauuaugaaaaaucaucugcgggacaucauggggauuccuuauugcaacuacuccaaguauugguaccucaaucacaccacaaccggaaaaacgagccugcccaaguguuggcuggucucuaacggcuccuaccucaaugaaacacacuucagcgacgauaucgagcagcaagccgacaacaugauuaccgagaugcugcagaaagaauauauggagcgccaggggaagaccccucuuggacugguugaucucuuuguguucucuaccagcuuuuaccugaucuccaucuuccugcaucuugugaaaauuccgugaggacuaguaauaaggaaacuguaugaaugucugugggcaggaagugaagagauccuucuguaaagguuuuuggaauuaugucugcugaauaauaaacuuuuuugaaauaauaaaucugguagaaaaaugagaucuaaaaaaaaaaaaaaaaaaaaaaaaaaaaaaaaaaaaaaaaaaaaaaaaaaaaaaaaaaaaaaaaaaaaaaaaaaaaaaaaaaaaaaaaaaaaaaaaaaaa

SEQ ID NO: 42915 - RNA, 1674 nt, Artificial Sequence
  mRNA product Design b-4 (A100) comprising derived and/or modified sequence from LASV(Mad39;Clade IV)__ANH09722__GPCmut13 (opt5)
aggagagucccgcagucggcguccagcggcucugcuuguucgugugugugucguugcaggccuuauucaagcuuaccaugggccagaucgugaccuucuuucaagaggucccccacguuauugaagaggugaugaacaucgugcugauugcccucagcauccuggcuguccuuaaggggcuguacaauguggccacaugcggacucauuggccugguuacguuccuucugcucugugggagauccugcaccacaacccuguauaaaggaguguacgaacugcaggcgcucgagcugaacauggaaacacuuaauaugaccaugccucugucuuguacaaagaacaauagccaucacuauauccgggucggcaacgagaccgggcucgagcugacgcuuaccaauacaucccugaucaaccauaaauuuugcaaucucucugacgcucacaagaaaaaccuguacgaucaugcccugaugagcauuaucuccaccuuccaccucucuauuccgaauuuuaaccaguaugaagccaugagcugugacuucaaugauggaaagaucuccgugcaguacaaccugagccacacauaugcuggcgacaccgccaaucauugcggcacgguugcuaacggggugcuucaaacauuuaugcgcauggccuggggaggcucuuacauugcgcuggauuccgggagaggaggcugggacuguaucaugaccagcuaccaguaucucauuauccagaacacaaccugggaggaucacugccaguucucucggcccuccccuaucggguaccugggacuucugagccaacgcaccagagacauuuauaucucucggcgccuccugggcacauuuacguggacccuguccgauagcgaaggcaaggacacacccgggggauacugucucaccagauggaugcugauugaggccgagcuuaaaugcuucggcaauacagcugucgccaaguguaacgaaaaacaugaugaggaauuuugcgacaugcugcgccucuucgauuuuaauaagcaggcuauccagcggcugaaagccgaggcgcagauguccauucaacuuaucaacaaggccgugaaugcucugaucaacgaccagcucauuaugaagaaucaccugagagacaucauggggauuccuuauugcaacuacucuaaauauugguaccugaaucacaccgugacgggaaagacaagccuccccaaauguuggcuggucuccaacggcagcuaccuuaaugaaacccauuucucugaugacaucgagcagcaagccgauaacaugauuaccgagaugcugcagaaggaauauauggagcggcaggggaaaacaccucucggacugguugaccuguucguguuuuccaccagcuucuaccuuaucucuaucuuucuccaccuggugaagauuccgugaggacuaguaauaaggaaacuguaugaaugucugugggcaggaagugaagagauccuucuguaaagguuuuuggaauuaugucugcugaauaauaaacuuuuuugaaauaauaaaucugguagaaaaaugagaucuaaaaaaaaaaaaaaaaaaaaaaaaaaaaaaaaaaaaaaaaaaaaaaaaaaaaaaaaaaaaaaaaaaaaaaaaaaaaaaaaaaaaaaaaaaaaaaaaaaaa

SEQ ID NO: 42916 - RNA, 1674 nt, Artificial Sequence
  mRNA product Design b-4 (A100) comprising derived and/or modified sequence from LASV(Z0947-SLE-2011;Clade IV)__AIT17840__GPCmut13 (opt5)
aggagagucccgcagucggcguccagcggcucugcuuguucgugugugugucguugcaggccuuauucaagcuuaccaugggccagaucgugaccuucuuucaagaggucccccacguuauugaagaggugaugaacaucgugcugauugcccucagcauccuggcuguccuuaaggggcuguacaauuucgccacaugcggacucgugggccugguuacguuucuucugcucugugggagauccugcaccauuucucuguauaaaggaguguacgaacugcagacacucgagcugaacauggaaacccuuaauaugacaaugccucugagcuguaccaagaacaauucccaucacuauaucauggucggcaacgagacagggcucgagcugacccuuacgaauaccucuaucauuaaccauaaauucugcaaucugagcgacgcgcacaagaaaaaccucuacgaucaugcucugauguccaucauuucuacauuucaccugagcaucccgaauuucaaccaguaugaagccauguccugugacuuuaauggaggcaagauuagcgugcaguacaaccucucucacuccuaugccggcgaugcugccaaucauugcgggaccguugcuaacggagugcugcaaacauucaugcggauggccuggggcgggagcuacaucgcgcuugacucuggacgcgauagaugggacuguauuaugaccuccuaccaguaucugaucauccagaacacgacaugggaggaucacugccaguuuagccggcccucuccuauuggcuaccucgggcugcuuucccaacgcaccagagacaucuauauuagccggcgccugcucggaacauucaccuggacccuguccgauucugaaggcaaggacacacccggcggguacugucugacgagauggaugcucaucgaggccgagcugaaaugcuuuggaaauaccgcugucgccaaguguaacgaaaaacaugaugaggaguucugcgacaugcuucggcuguuugauuucaauaagcaggcuauucagcgccucaaagccgaagcgcagaugagcauccaacugaucaacaaggccgugaaugcucuuauuaacgaccagcugaucaugaagaaucaccucagagacauuaugggcaucccuuauugcaacuacuccaaauauugguaccugaaucacacaaccacagggaagaccagccugcccaaauguuggcucgugucuaacggauccuaccugaaugaaacgcauuucagcgaugacauugagcagcaagccgauaacaugaucacagagaugcuucagaaggaauauauggagcggcagggcaaaaccccucuggggcucgucgaccuguuuguuuucucuaccagcuuuuaccugaucuccauuuuccuucaccucgugaagaucccgugaggacuaguaauaaggaaacuguaugaaugucugugggcaggaagugaagagauccuucuguaaagguuuuuggaauuaugucugcugaauaauaaacuuuuuugaaauaauaaaucugguagaaaaaugagaucuaaaaaaaaaaaaaaaaaaaaaaaaaaaaaaaaaaaaaaaaaaaaaaaaaaaaaaaaaaaaaaaaaaaaaaaaaaaaaaaaaaaaaaaaaaaaaaaaaaaa

SEQ ID NO: 42917 - RNA, 1544 nt, Artificial Sequence
  mRNA product Design i-3 (hSL-A64-N5) comprising derived and/or modified sequence from LASV(Josiah;Clade IV)__NP_694870__GPCmut13 (opt1) R8478/R8479
aggagaaagcuuaccaugggccagaucgugaccuucuuccaggaggucccccacgugaucgaggaggugaugaacaucguccugaucgcccucagcgugcuggccgugcugaaggggcucuacaacuucgcgaccugcggccuggucgggcuggugacguuccuccugcugugcggccgcuccugcaccaccagccucuacaaggggguguacgagcugcagacccuggagcucaacauggagacgcugaacaugaccaugccgcuguccugcaccaagaacaacagccaccacuacaucauggucggcaacgagaccggccucgagcugacgcugaccaacaccuccaucaucaaccacaaguucugcaaccucagcgacgcccacaagaagaaccuguacgaccacgcccugauguccaucaucagcaccuuccaccucuccauccccaacuucaaccaguacgaggccaugagcugcgacuucaacgggggcaagaucuccgugcaguacaaccugagccacuccuacgccggggacgcggccaaccacugcggcacgguggccaacgggguccugcagaccuucaugcggauggccuggggcggcagcuacaucgcgcucgacuccgggcgcggcaacugggacugcaucaugaccagcuaccaguaccugaucauccagaacaccacgugggaggaccacugccaguucucccggcccagccccaucggguaccugggccuccugucccagcgcacccgggacaucuacaucagccgccggcugcucggcaccuucaccuggacgcugagcgacuccgaggggaaggacaccccgggcggguacugccugacccgcuggaugcucaucgaggccgagcugaagugcuucggcaacaccgccguggccaagugcaacgagaagcacgacgaggaguucugcgacaugcugcggcuguucgacuucaacaagcaggccauccagcgccugaaggcggaggcccagaugagcauccagcugaucaacaaggccgugaacgcccucaucaacgaccagcugaucaugaagaaccaccuccgggacaucauggggauccccuacugcaacuacuccaaguacugguaccucaaccacacgaccaccggccgcaccagccugcccaagugcuggcuggucuccaacggcagcuaccucaacgagacgcacuucuccgacgacaucgagcagcaggccgacaacaugaucaccgagaugcugcagaaggaguacauggagcggcaggggaagacgccccugggccucguggaccuguucguguucagcaccuccuucuaccugaucagcaucuuccugcaccucgucaagaucccgugaggacuaguuauaagacugacuagcccgaugggccucccaacgggcccuccuccccuccuugcaccgagauuaaucaaaggcucuuuucagagccaccaaaaaaaaaaaaaaaaaaaaaaaaaaaaaaaaaaaaaaaaaaaaaaaaaaaaaaaaaaaaaaaaagaauu

SEQ ID NO: 42918 - RNA, 1541 nt, Artificial Sequence
  mRNA product Design i-3 (hSL-A64-N5) comprising derived and/or modified sequence from LASV(LP;Clade I)__AAF86701__GPCmut13 (opt1)
aggagaaagcuuaccaugggccagaucaucaccuucuuccaggaggugccccacgucaucgaggaggugaugaacaucgugcugaucgcccucagccugcuggccauccucaaggggcuguacaacaucgcgaccugcggcaucaucgggcuggucgccuuccucuuccugugcggcaaguccugcagccugacgcucaagggcggguacgagcugcagacccuggagcucaacauggagacccugaacaugaccaugccgcuguccugcacgaagaacagcucccaccacuacauccgcgugggcaacgagaccgggcucgagcugacccugaccaacacgagcaucaucaaccacaaguucugcaaccucuccgacgcccacaagaagaaccuguacgaccacgcccugaugagcaucaucuccaccuuccaccucagcauccccaacuucaaccaguacgaggccauguccugcgacuucaacggcgggaagaucagcgugcaguacaaccugucccacagcuacgcgggcgacgccgccgagcacugcgggaccgucgccaacggcgugcugcagaccuucaugcggauggcguggggcgggcgcuacaucgcccucgacuccggcaaggggaacugggacugcaucaugacgagcuaccaguaccugaucauccagaacaccaccugggaggaccacugccaguucucccggcccagccccaucggcuaccugggccuccugucccagcgcacccgggacaucuacaucagccgccggcugcucgggacguucaccuggacccugagcgacuccgagggcaacgagacccccgggggcuacugccugacgcgcuggaugcucaucgaggccgagcugaagugcuucgggaacaccgccguggccaagugcaacgagaagcacgacgaggaguucugcgacaugcugcggcuguucgacuucaacaagcaggcgauccgccggcugaaggccgaggcccagaugagcauccagcugaucaacaaggccgucaacgcccucaucaacgaccagcugaucaugaagaaccaccuccgcgacaucaugggcauccccuacugcaacuacuccaaguacugguaccucaaccacaccagcuccggccggaccagccugcccaagugcuggcugaucuccaacgggagcuaccucaacgagacgcaguucuccgacgacaucgagcagcaggcggacaacaugaucaccgagaugcugcagaaggaguacaucgagcgccagggcaagaccccgcuggggcucguggacaucuucaucuucagcaccuccuucuaccugaucagcaucuuccugcaccugaucaagaucccgugaggacuaguuauaagacugacuagcccgaugggccucccaacgggcccuccuccccuccuugcaccgagauuaaucaaaggcucuuuucagagccaccaaaaaaaaaaaaaaaaaaaaaaaaaaaaaaaaaaaaaaaaaaaaaaaaaaaaaaaaaaaaaaaaagaauu

SEQ ID NO: 42919 - RNA, 1541 nt, Artificial Sequence
  mRNA product Design i-3 (hSL-A64-N5) comprising derived and/or modified sequence from LASV(803213;Clade II)__AAF86703__GPCmut13 (opt1)
aggagaaagcuuaccaugggccagaucaucaccuucuuccaggaggugccccacgucaucgaggaggugaugaacaucgugcugaucgcccucagccugcuggccauccucaaggggaucuacaacgucgcgaccugcggccuguucgggcugaucuccuuccuccugcugugcggccgcagcugcuccgugacguacaaggggguguacgagcuccagacccuggagcugaacauggccaaccucaacaugaccaugccgcugagcugcaccaagaacaacucccaccacuacaucauggucggcaacgagacgggccuggagcucacccugaccaacaccagcaucaucaaccacaaguucugcaaccuguccgacgcccacaagaagaaccucuacgaccacgcccugaugagcaucaucuccacguuccaccugagcauccccaacuucaaccaguacgaggccauguccugcgacuucaacgggggcaagaucagcgugcaguacaaccucucccacagcuucgcgguggacgccgccaaccacugcgggaccaucgccaacggcguccugcagaccuucaugcggauggcguggggcggguccuacaucgcccuggacagcggcaaggggaacugggacugcaucaugaccuccuaccaguaccucaucauccagaacacgaccugggaggaccacugccaguucagccgccccucccccaucggcuaccuggggcugcucagccagcggacccgcgacaucuacaucagccggcgccugcugggcaccuucacguggacccucuccgacagcgagggcaacgaggcccccgggggcuacugccugacccgguggaugcugaucgaggccgagcucaagugcuucgggaacaccgccguggcgaagugcaacgagaagcacgacgaggaguucugcgacaugcugcgccuguucgacuucaacaagcaggccaucaagcggcucaagacggaggcccagauguccauccagcugaucaacaaggccgugaacgcccugaucaacgaccagcucaucaugaagaaccaccuccgcgacaucaugggcauccccuacugcaacuacagccgguacugguaccugaaccacaccgucaccgggaagaccucccugccccgcugcuggcuggugagcaacggcuccuaccugaacgagacgcacuucagcgacgacaucgagcagcaggcggacaacaugaucaccgagaugcuccagaaggaguacauggaccggcagggcaagaccccgcuggggcugguggaccucuucgucuucuccaccagcuucuaccugaucuccaucuuccugcaccuggugaagaucccgugaggacuaguuauaagacugacuagcccgaugggccucccaacgggcccuccuccccuccuugcaccgagauuaaucaaaggcucuuuucagagccaccaaaaaaaaaaaaaaaaaaaaaaaaaaaaaaaaaaaaaaaaaaaaaaaaaaaaaaaaaaaaaaaaagaauu

SEQ ID NO: 42920 - RNA, 1541 nt, Artificial Sequence
  mRNA product Design i-3 (hSL-A64-N5) comprising derived and/or modified sequence from LASV(GA391;Clade III)__CAA36645__GPCmut13 (opt1)
aggagaaagcuuaccaugggccagaucgugaccuucuuccaggaggucccccacgugaucgaggaggugaugaacaucguccugaucgcccucagcauccuggccauccugaaggggcucuacaacguggcgaccugcggccugaucgggcuggugacguuccuccugcuguccggccgcagcugcucccucaucuacaaggggaccuacgagcugcagacccuggagcucaacauggagacccugaacaugacgaugccgcugagcugcaccaagaacaacucccaccacuacauccgggucggcaacgagaccggccucgagcugacccugacgaacaccagcauccucaaccacaaguucugcaaccuguccgacgcccacaagcgcaaccuguacgaccacagccucauguccaucaucagcaccuuccaccuguccauccccaacuucaaccaguacgaggccaugagcugcgacuucaacgggggcaagaucaccgugcaguacaaccugucccacagcuucgccguggacgccgcggggcacugcggcacgcucgccaacgggguccugcagaccuucaugcggauggccuggggcggcuccuacaucgcccuggacagcgggcgcggcaacugggacugcaucaugaccuccuaccaguaccucaucauccagaacaccacgugggacgaccacugccaguucagccggcccucccccaucggguaccugggccugcucagccagcgcacccgggacaucuacaucagccgccggcugcugggcaccuucaccuggacgcucuccgacagcgaggggaacgagaccccgggcggguacugccugacccgcuggaugcugaucgaggcggagcucaagugcuucggcaacaccgccguggccaagugcaacgagaagcacgacgaggaguucugcgacaugcugcggcuguucgacuucaacaagcaggccauccgccggcucaagacggaggcccagauguccauccagcugaucaacaaggcggugaacgcccugaucaacgaccagcucaucaugaagaaccaccuccgcgacaucauggggauccccuacugcaacuacagccgguacugguaccugaaccacaccuccaccggcaagaccagccugccccgcugcuggcugaucuccaacggcagcuaccugaacgagacgaaguucuccgacgacaucgagcagcaggccgacaacaugaucaccgagaugcuccagaaggaguacaucgaccggcaggggaagacgccccugggccuggucgaccuguucguguucagcaccuccuucuaccucaucagcaucuuccugcaccuggugaagaucccgugaggacuaguuauaagacugacuagcccgaugggccucccaacgggcccuccuccccuccuugcaccgagauuaaucaaaggcucuuuucagagccaccaaaaaaaaaaaaaaaaaaaaaaaaaaaaaaaaaaaaaaaaaaaaaaaaaaaaaaaaaaaaaaaaagaauu

SEQ ID NO: 42921 - RNA, 1544 nt, Artificial Sequence
  mRNA product Design i-3 (hSL-A64-N5) comprising derived and/or modified sequence from LASV(AV;Clade V)__CCA30314__GPCmut13 (opt1)
aggagaaagcuuaccaugggccagaucgugaccuucuuccaggaggucccccacgugaucgaggaggugaugaacaucguccugaucgcccucagcauccuggccgugcugaaggggcucuacaacaucgcgaccugcggccugaucgggcugaucacguuccuccugcugugcggccgcuccugcagcuccaaccucuacaaggggguguacgagcugcagagccuggaccucaacauggagacccugaacaugaccaugccgcuguccugcaccaagaacaacagccaccacuacauccgggucggcaacgacacgggccucgagcugacccugaccaacaccuccauccucaaccacaaguucugcaaccugagcgacgcccacaagaaggaccuguacgaccacgcccucauguccaucaucagcacguuccaccuguccauccccaacuucaaccaguacgaggccaugagcugcgacuucaacgggggcaagaucuccgugcaguacaaccugagccacuccuacgccaucgacgcggccaaccacugcgggaccguggccaacggcauccuccagaccuucaugcgcauggccuggggcgggagcuacaucgcgcuggacuccggccgggggaacugggacugcaucaugaccagcuaccaguaccugaucauccagaacacgaccugggagaaccacugccaguucucccgccccagccccaucggcuaccucgggcugcugagccagcggacccgcgacaucuacaucucccggcgccuccugggcaccuucacguggacccugagcgacuccgagggcaacgccacccccgggggcuacugccucacccgguggaugcugaucgaggccgagcugaagugcuucgggaacacggccgucgccaagugcaacgagaagcacgacgaggaguucugcgacaugcuccgccuguucgacuucaacaagcaggcgaucagccggcugaaguccgaggcccagaugagcauccagcucaucaacaaggccgugaacgcccugaucaacgaccagcugaucaugaagaaccaccuccgcgacaucaugggcauccccuacugcaacuacuccaaguacugguaccugaaccacaccaucaccgggaagaccagccugcccaagugcuggcucguguccaacggcagcuaccugaacgagacgcacuucuccgacgacaucgagcagcaggccgacaacaugaucaccgagaugcugcagaaggaguacauggagcggcagggcaagaccccgcucgggcuggucgaccuguucguguucagcaccuccuucuaccugaucagcaucuuccuccgccuggugaagaucccgugaggacuaguuauaagacugacuagcccgaugggccucccaacgggcccuccuccccuccuugcaccgagauuaaucaaaggcucuuuucagagccaccaaaaaaaaaaaaaaaaaaaaaaaaaaaaaaaaaaaaaaaaaaaaaaaaaaaaaaaaaaaaaaaaagaauu

SEQ ID NO: 42922 - RNA, 1541 nt, Artificial Sequence
  mRNA product Design i-3 (hSL-A64-N5) comprising derived and/or modified sequence from LASV(Togo/2016/7082;Clade VI)__AMR44577__GPCmut13 (opt1)
aggagaaagcuuaccaugggccagaucaucaccuucuuccaggaggugccccacgucaucgaggaggugaugaacaucgugcugaucgcccucagccugcuggccauccucaagggggucuacaacguggcgaccugcggcaucaucgggcuggugacguuccuguuccucugcggccgcuccugcagccugaucuacaagggguccuacgagcugcagacccucgagcugaacauggagacccugaacaugaccaugccgcucagcugcacgaagaacuccagccaccacuacauccgggucggcaacgagaccggccuggagcugacccucaccaacacguccaucaucaaccacaaguucugcaaccugagcgacgcccacaagcgcaaccuguacgaccacgcccucauguccauccugagcaccuuccaccuguccauccccaacuucaaccaguacgaggccaugagcugcgacuucaacgggggcaagaucuccgugcaguacaaccucagccacgccuacgcgguggacgccgccgagcacugcgggaccgucgccaacggcgugcugcagaccuucaugcggauggcguggggcggguccuacaucgcccuggacagcggccgcgggaacugggacugcaucaugacguccuaccaguaccucaucauccagaacaccaccugggaggaccacugccaguucagccggcccucccccaucggcuaccuggggcugcucagccagcgcacccgggacaucuacaucagccgccggcugcugggcacguucaccuggacccucuccgacagcgagggcaacgagacccccgggggcuacugccugacgcgcuggaugcugaucgaggccgagcucaagugcuucgggaacaccgccguggccaagugcaacgagaagcacgacgaggaguucugcgacaugcugcggcuguucgacuucaacaagcaggcgauccagcgccucaaguccgaggcccagaugagcauccagcugaucaacaaggccgucaacgcccugaucaacgaccagcucaucaugaagaaccaccuccgggacaugaugggcauccccuacugcaacuacuccaaguacugguaccugaaccacaccagcuccgggcgcaccagccugcccaagugcuggcugguguccaacggcagcuaccugaacgagacgcacuucuccgacgacaucgagcagcaggccgacaacaugaucaccgagaugcuccagaaggaguacaucgaccggcagggcaagaccccgcuggggcugguggaccucuucgucuucagcaccuccuucuaccugaucagcaucuuccugcaccugaucaagaucccgugaggacuaguuauaagacugacuagcccgaugggccucccaacgggcccuccuccccuccuugcaccgagauuaaucaaaggcucuuuucagagccaccaaaaaaaaaaaaaaaaaaaaaaaaaaaaaaaaaaaaaaaaaaaaaaaaaaaaaaaaaaaaaaaaagaauu

SEQ ID NO: 42923 - RNA, 1541 nt, Artificial Sequence
  mRNA product Design i-3 (hSL-A64-N5) comprising derived and/or modified sequence from LASV(KAK-428;Clade n.d. (VII))__ANH09740__GPCmut13 (opt1)
aggagaaagcuuaccaugggccagaucgugaccuucuuccaggaggucccccacgugaucgaggaggugaugaacaucguccugaucgcccucagccugcuggccauccucaaggggcuguacaacuucgcgaccugcggcgugaucgggcugaucacguuccuccugcugugcggccgcuccugcagcgccaccuacaaggggcaguacgagcuccagacccuggagcugaacauggagucccucaacaugaccaugccgcugagcugcacgaagaacaacucccaccacuacauccgggccggcaacaacaccggccuggagcucacccugaccaacacgagcaucaucucccacaaguucugcaaccugagcgacgcccacaagaagaaccucuacgaccacacccugauguccaucaucaccaccuuccaccugagcauccccaacuucaaccaguacgaggccauguccugcgacuucaacgggggcaagaucagcauccaguacaaccucucccacagcuacgcgggggacgccgcccagcacugcggcacgguggccaacgggguccugcagaccuucaugcgcauggcguggggcggcuccuaccuggcccucgacagcgggcggcgcggcugggacugcaucaucuccagcuaccaguaccugaucauccagaacaccaccugggacgaccacugccaguucucccggcccagccccaucggguaccugggcuucgugagccagaagacgcgcgacaucuacaucucccggcgccuccugggcaccuucaccuggacccugagcgacuccgaggggcacgacaugccgggcggguacugccucacgcgguggaugcugaucgaggccgaccugaagugcuucggcaacaccgccguggccaagugcaacgagaagcacgacgaggaguucugcgacauguggcgccucuucgacuucaacaagcaggcgauccagcggcugaaggccgaggcccagaugaacauccagcugaucaacaaggccgucaacgcccucaucaacgaccagcugaugaugaagaaccaccuccgcgacaucauggggauccccuacugcaacuacagcaaguucugguaccugaacaacaccaccacgggccggaccucccugccccgcugcuggcugaucagcaacggcuccuaccucaacgagacccacuucagcgacgacaucgagcagcaggcggacaacaugaucaccgagaugcugcagaaggaguacauggaccggcaggggaagacgccccugggccucguggaccuguucguguucuccaccagcuucuaccugaucaccaucuuccuccaccuggucaagaucccgugaggacuaguuauaagacugacuagcccgaugggccucccaacgggcccuccuccccuccuugcaccgagauuaaucaaaggcucuuuucagagccaccaaaaaaaaaaaaaaaaaaaaaaaaaaaaaaaaaaaaaaaaaaaaaaaaaaaaaaaaaaaaaaaaagaauu

SEQ ID NO: 42924 - RNA, 1541 nt, Artificial Sequence; identical to SEQ ID NO: 42918
  mRNA product Design i-3 (hSL-A64-N5) comprising derived and/or modified sequence from LASV(Pinneo-NIG-1969;Clade I)__AIT17836__GPCmut13 (opt1)

SEQ ID NO: 42925 - RNA, 1541 nt, Artificial Sequence
  mRNA product Design i-3 (hSL-A64-N5) comprising derived and/or modified sequence from LASV(ISTH0009-NIG-2011;Clade II)__AIT17404__GPCmut13 (opt1)
aggagaaagcuuaccaugggccagaucaucaccuucuuccaggaggugccccacgucaucgaggaggugaugaacaucgugcugaucgcccucagccugcuggccauccucaaggggaucuacaacgucgcgaccugcggccuguucgggcugguguccuuccuccugcugugcggccgcagcugcuccacgaccuacaaggggguguacgagcuccagacccuggagcuggacauggccagccucaacaugaccaugccgcuguccugcacgaagaacaacagccaccacuacaucauggucggcaacgagaccggccuggagcucacccugaccaacacguccaucaucaaccacaaguucugcaaccugagcgacgcccacaagaagaaccucuacgaccacgcccugauguccaucaucagcaccuuccaccuguccauccccaacuucaaccaguacgaggccaugagcugcgacuucaacgggggcaagaucuccgugcaguacaaccucagccacgcguacgccguggacgccgccaaccacugcgggaccaucgcgaacggcguccugcagaccuucaugcggauggccuggggcggguccuacaucgcccuggacagcggcaagggguccugggacugcaucaugacgagcuaccaguaccucaucauccagaacaccaccugggaggaccacugccaguucucccgccccagccccaucggcuaccuggggcugcucagccagcggacccgcgacaucuacaucucccggcgccugcugggcacguucaccuggacccucagcgacuccgagggcaacgagacccccgggggcuacugccugacgcgguggaugcugaucgaggccgagcucaagugcuucgggaacaccgccguggcgaagugcaacgagaagcacgacgaggaguucugcgacaugcugcgccuguucgacuucaacaagcaggccauccggcgccucaagaccgaggcccagaugagcauccagcugaucaacaaggccgugaacgcccugaucaacgaccagcucaucaugaagaaccaccuccgggacaucaugggcaucccguacugcaacuacuccaaguacugguaccugaaccacaccgucacggggaagaccagccugccccgcugcuggcugguguccaacggcagcuaccugaacgagacccacuucuccgacgacaucgagcagcaggcggacaacaugaucaccgagcuccugcagaaggaguacauggaccggcagggcaagacgccccuggggcucguggaccuguucgucuucagcaccuccuucuaccugaucagcaucuuccugcaccucaucaagaucccgugaggacuaguuauaagacugacuagcccgaugggccucccaacgggcccuccuccccuccuugcaccgagauuaaucaaaggcucuuuucagagccaccaaaaaaaaaaaaaaaaaaaaaaaaaaaaaaaaaaaaaaaaaaaaaaaaaaaaaaaaaaaaaaaaagaauu

SEQ ID NO: 42926 - RNA, 1541 nt, Artificial Sequence
  mRNA product Design i-3 (hSL-A64-N5) comprising derived and/or modified sequence from LASV(ISTH2010-NIG-2012;Clade II)__AIT17482__GPCmut13 (opt1)
aggagaaagcuuaccaugggccagaucaucaccuucuuccaggaggugccccacgucaucgaggaggugaugaacaucgugcugaucgcccucagccugcuggccauccucaaggggaucuacaacgucgcgaccugcggccuguucgggcugguguccuuccuccugcugugcggccgcagcugcuccacgaccuacaaggggguguacgagcuccagacccuggagcuggacauggccagccucaacaugaccaugccgcuguccugcacgaagaacaacagccaccacuacaucauggucggcaacgagaccggccuggagcucacccugaccaacacguccaucaucaaccacaaguucugcaaccugagcgacgcccacaagaagaaccucuacgaccacgcccugauguccaucaucagcaccuuccaccuguccauccccaacuucaaccaguacgaggccaugagcugcgacuucaacgggggcaagaucuccgugcaguacaaccucagccacgcguacgccguggacgccgccaaccacugcgggaccaucgcgaacggcguccugcagaccuucaugcggauggccuggggcggguccuacaucgcccuggacagcggcaagggguccugggacugcaucaugacgagcuaccaguaccucaucauccagaacaucaccugggaggaccacugccaguucucccgccccagccccaucggcuaccuggggcugcucagccagcggacccgcgacaucuacaucucccggcgccugcugggcaccuucacguggacccucagcgacuccgagggcaacgagacccccgggggcuacugccugacccgguggaugcugaucgaggccgagcucaagugcuucgggaacacggccguggcgaagugcaacgagaagcacgacgaggaguucugcgacaugcugcgccuguucgacuucaacaagcaggccauccggcgccucaagaccgaggcccagaugagcauccagcugaucaacaaggccgugaacgcccugaucaacgaccagcucaucaugaagaaccaccuccgggacaucaugggcauccccuacugcaacuacuccaaguacugguaccugaaccacaccgucaccgggaagacgagccugccccgcugcuggcugguguccaacggcagcuaccugaacgagacccacuucuccgacgacaucgagcagcaggcggacaacaugaucaccgagcuccugcagaaggaguacaucgaccggcagggcaagaccccgcuggggcucguggaccuguucgucuucagcacguccuucuaccugaucagcaucuuccugcaccucgugaagaucccgugaggacuaguuauaagacugacuagcccgaugggccucccaacgggcccuccuccccuccuugcaccgagauuaaucaaaggcucuuuucagagccaccaaaaaaaaaaaaaaaaaaaaaaaaaaaaaaaaaaaaaaaaaaaaaaaaaaaaaaaaaaaaaaaaagaauu

SEQ ID NO: 42927 - RNA, 1541 nt, Artificial Sequence
  mRNA product Design i-3 (hSL-A64-N5) comprising derived and/or modified sequence from LASV(Lassa virus/H.sapiens-wt/NGA/2015/ISTH_0543;Clade II)__AVO03639__GPCmut13 (opt1)
aggagaaagcuuaccaugggccagaucaucaccuucuuccaggaggugccccacgucaucgaggaggugaugaacaucgugcugaucgcccucagccugcuggccauccucaaggggaucuacaacgucgcgaccugcggccuguucgggcugguguccuuccuccugcugugcggccgcagcugcuccacgaccuacaaggggguguacgagcuccagacccuggagcuggacauggccaaccucaacaugaccaugccgcugagcugcacgaagaacaacucccaccacuacaucauggucggcaacgagaccggccuggagcucacccugaccaacacgagcaucaucaaccacaaguucugcaaccuguccgacgcccacaagaagaaccucuacgaccacgcccugaugagcaucaucuccaccuuccaccugagcauccccaacuucaaccaguacgaggccauguccugcgacuucaacgggggcaagaucagcgugcaguacaaccucucccacaccuacgcgguggacgccgccaaccacugcgggaccaucgccaacggcguccugcagacguucaugcggauggcguggggcgggagcuacaucgcccuggacuccggcaaggggagcugggacugcaucaugaccuccuaccaguaccucgugauccagaacaccaccugggaggaccacugccaguucagccgccccucccccaucggcuaccuggggcugcucagccagcggacgcgcgacaucuacaucagccggcgccugcugggcaccuucaccuggacccucuccgacagcgagggcaacgagacgcccgggggcuacugccugacccgguggaugcugaucgaggccgagcucaagugcuucgggaacaccgccguggccaagugcaacgagaagcacgacgaggaguucugcgacaugcugcgccuguucgacuucaacaagcaggcgauccggcgccucaagaccgaggcccagauguccauccagcugaucaacaaggccgucaacgcccugaucaacgaccagcucaucaugaagaaccaccuccgggacaucaugggcauccccuacugcaacuacagcaaguacugguaccugaaccacacggugaccgggaagaccucccugccccgcugcuggcuggugagcaacggcuccuaccugaacgagacccacuucagcgacgacaucgagcagcaggccgacaacaugaucacggagcuccugcagaaggaguacaucgaccggcagggcaagaccccgcuggggcucgucgaccuguucguguucuccaccagcuucuaccugaucuccaucuuccugcaccucgugaagaucccgugaggacuaguuauaagacugacuagcccgaugggccucccaacgggcccuccuccccuccuugcaccgagauuaaucaaaggcucuuuucagagccaccaaaaaaaaaaaaaaaaaaaaaaaaaaaaaaaaaaaaaaaaaaaaaaaaaaaaaaaaaaaaaaaaagaauu

SEQ ID NO: 42928 - RNA, 1541 nt, Artificial Sequence
  mRNA product Design i-3 (hSL-A64-N5) comprising derived and/or modified sequence from LASV(Lassa virus/H.sapiens-wt/NGA/2016/ISTH_0009;Clade II)__AVO03571__GPCmut13 (opt1)
aggagaaagcuuaccaugggccagaucaucaccuucuuccaggaggugccccacgucaucgaggaggugaugaacaucgugcugaucgcccucagccugcuggccauccucaaggggaucuacaacgucgcgaccugcggccugcuggggcucguguccuuccugcugcucugcggccgcagcugcuccacgaccuacaaggggguguacgagcugcagacccuggagcucgacauggccagccugaacaugaccaugccgcuguccugcacgaagaacaacagccaccacuacaucauggucggcaacgagaccggccucgagcugacccugaccaacacguccaucaucaaccacaaguucugcaaccucagcgacgcccacaagaagaaccuguacgaccacgcccugauguccaucaucagcaccuuccaccucuccauccccaacuucaaccaguacgaggccaugagcugcgacuucaacgggggccggaucuccgugcaguacaaccugagccacuccuacgcgguggacgccgccaaccacugcgggaccaucgccaacggcguccugcagaccuucaugcgcauggcguggggcgggagcuacaucgcccucgacuccggcaaggggagcugggacugcaucaugacguccuaccaguaccugaucauccagaacaccaccugggaggaccacugccaguucagccggcccagccccaucggcuaccuggggcuccugucccagcgcacccgggacaucuacaucagccgccggcugcucggcacguucaccuggacccuguccgacagcgagggcaacgagacccccgggggcuacugccugacgcgcuggaugcucaucgaggccgagcugaagugcuucgggaacaccgccguggccaagugcaacgagaagcacgacgaggaguucugcgacaugcugcggcuguucgacuucaacaagcaggcgauccgccggcugaagaccgaggcccagauguccauccagcugaucaacaaggccgugaacgcccucaucaacgaccagcugaucaugaagaaccaccuccgcgacaucaugggcaucccguacugcaacuacagcaaguacugguaccucaaccacaccgucacggggaagaccucccugccccggugcuggcuggugagcaacggcuccuaccucaacgagacccacuucagcgacgacaucgagcagcaggccgacaacaugaucaccgagcugcugcagaaggaguacaucgaccgccagggcaagacgccccucgggcugguggaccuguucgucuucuccaccagcuucuaccugaucuccaucuuccuccaccuggugaagaucccgugaggacuaguuauaagacugacuagcccgaugggccucccaacgggcccuccuccccuccuugcaccgagauuaaucaaaggcucuuuucagagccaccaaaaaaaaaaaaaaaaaaaaaaaaaaaaaaaaaaaaaaaaaaaaaaaaaaaaaaaaaaaaaaaaagaauu

SEQ ID NO: 42929 - RNA, 1541 nt, Artificial Sequence
  mRNA product Design i-3 (hSL-A64-N5) comprising derived and/or modified sequence from LASV(Lassa virus/H.sapiens-wt/NGA/2016/ISTH_0017;Clade II)__AVO03567__GPCmut13 (opt1)
aggagaaagcuuaccaugggccagaucaucaccuucuuccaggaggugccccacgucaucgaggaggugaugaacaucgugcugaucgcccucagccugcuggccauccucaaggggaucuacaacgucgcgaccugcggccuguucgggcugguguccuuccuccugcugugcggccgcagcugcuccacgaccuacaaggggguguacgagcuccagacccuggagcuggacauggccagccucaacaugaccaugccgcuguccugcacgaagaacaacagccaccacuacaucauggucggcaacgagaccggccuggagcucacccugaccaacacguccaucaucaaccacaaguucugcaaccugagcgacgcccacaagaagaaccucuacgaccacgcccugauguccaucaucagcaccuuccaccuguccauccccaacuucaaccaguacgaggccaugagcugcgacuucaacgggggcaagaucuccgugcaguacaaccucagccacaccuacgcgaucgacgccgccaaccacugcgggaccaucgccaacggcgugcugcagacguucaugcggauggcguggggcggguccuacaucgcccuggacagcggcaagggguccugggacugcaucaugaccagcuaccaguaccucaucauccagaacaccaccugggaggaccacugccaguucucccgccccagccccaucggcuaccuggggcugcucagccagcggacgcgcgacaucuacaucucccggcgccugcugggcaccuucaccuggacccucagcgacuccgagggcaacgagacgcccgggggcuacugccugacccgguggaugcugaucgaggccgagcucaagugcuucgggaacaccgccgucgccaagugcaacgagaagcacgacgaggaguucugcgacaugcugcgccuguucgacuucaacaagcaggcgauccggcgccucaagaccgaggcccagaugagcauccagcugaucaacaaggccgugaacgcccugaucaacgaccagcucaucaugaagaaccaccuccgggacaucaugggcauccccuacugcaacuacuccaaguacugguaccugaaccacacggugaccgggaagaccagccugccccgcugcuggcuggucuccaacggcagcuaccugaacgagacccacuucuccgacgacaucgagcagcaggccgacaacaugaucacggagcuccugcagaaggaguacauggaccggcagggcaagaccccgcuggggcucguggaccuguucguguucagcaccuccuucuaccugaucagcaucuuccugcaccucguccgcaucccgugaggacuaguuauaagacugacuagcccgaugggccucccaacgggcccuccuccccuccuugcaccgagauuaaucaaaggcucuuuucagagccaccaaaaaaaaaaaaaaaaaaaaaaaaaaaaaaaaaaaaaaaaaaaaaaaaaaaaaaaaaaaaaaaaagaauu

SEQ ID NO: 42930 - RNA, 1541 nt, Artificial Sequence
  mRNA product Design i-3 (hSL-A64-N5) comprising derived and/or modified sequence from LASV(Lassa virus/H.sapiens-wt/NGA/2018/ISTH_0959;Clade II)__AVV65099__GPCmut13 (opt1)
aggagaaagcuuaccaugggccagaucaucaccuucuuccaggaggugccccacgucaucgaggaggugaugaacaucgugcugaucgcccucagccugcuggccauccucaaggggaucuacaacgucgugaccugcggccuguucgggcugguguccuuccuccugcugugcggccgcagcugcuccacgaccuacaagggggucuacgagcuccagacccuggagcuggacauggcgagccucaacaugaccaugccgcuguccugcacgaagaacaacagccaccacuacaucauggugggcaacgagaccggccuggagcucacccugaccaacacguccaucaucaaccacaaguucugcaaccugagcgacgcccacaagaagaaccucuacgaccacgcccugauguccaucaucagcaccuuccaccuguccauccccaacuucaaccaguacgaggccaugagcugcgacuucaacgggggcaagaucuccgugcaguacaaccucagccacgccuacgcgaucgacgccgccaaccacugcgggaccaucgccaacggcguccugcagaccuucaugcggauggcguggggcggguccuacaucgcccuggacagcggcaagggguccugggacugcaucaugacgagcuaccaguaccucaucauccagaacaccaccugggaggaccacugccaguucucccgccccagccccaucggcuaccuggggcugcucagccagcggacccgcgacaucuacaucucccggcgccugcugggcacguucaccuggacccucagcgacuccgagggcaacgagacccccgggggcuacugccugacgcgguggaugcugaucgaggccgagcucaagugcuucgggaacaccgccguggccaagugcaacgagaagcacgacgaggaguucugcgacaugcugcgccuguucgacuucaacaagcaggcgauccggcgccucaagaccgaggcccagaugagcauccagcugaucaacaaggccgugaacgcccugaucaacgaccagcucaucaugaagaaccaccuccgggacaucaugggcaucccguacugcaacuacuccaaguacugguaccugaaccacaccgucacggggaagaccagccugccccgcugcuggcugguguccaacggcagcuaccugaacgagacccacuucuccgacgacaucgagcagcaggccgacaacaugaucaccgagcuccugcagaaggaguacaucgaccggcagggcaagacgccccuggggcucguggaccuguucgucuucagcaccuccuucuaccugaucagcaucuuccugcaccucgugaagaucccgugaggacuaguuauaagacugacuagcccgaugggccucccaacgggcccuccuccccuccuugcaccgagauuaaucaaaggcucuuuucagagccaccaaaaaaaaaaaaaaaaaaaaaaaaaaaaaaaaaaaaaaaaaaaaaaaaaaaaaaaaaaaaaaaaagaauu

SEQ ID NO: 42931 - RNA, 1541 nt, Artificial Sequence
  mRNA product Design i-3 (hSL-A64-N5) comprising derived and/or modified sequence from LASV(LASV003-NIG-2008;Clade II)__AIT17580__GPCmut13 (opt1)
aggagaaagcuuaccaugggccagaucaucaccuucuuccaggaggugccccacgucaucgaggaggugaugaacaucgugcugaucgcccucagccugcuggccauccucaaggggaucuacaacgucgcgaccugcggccuguucgggcugguguccuuccuccugcugugcggccgcagcugcuccacgaccuacaaggggguguacgagcuccagacccuggagcuggacauggccagccucaacaugaccaugccgcuguccugcacgaagaacaacagccaccacuacaucauggucggcaacgagaccggccuggagcucacccugaccaacacguccaucaucaaccacaaguucugcaaccugagcgacgcccacaagaagaaccucuacgaccacgcccugauguccaucaucagcaccuuccaccuguccauccccaacuucaaccaguacgaggccaugagcugcgacuucaacgggggcaagaucuccgugcaguacaaccucagccacaccuacgcgguggacgccgccaaccacugcgggaccaucgccaacggcguccugcagacguucaugcggauggcguggggcggguccuacaucgcccuggacagcggcaagggguccugggacugcaucaugaccagcuaccaguaccucaucauccagaacaccaccugggaggaccacugccaguucucccgccccagccccaucggcuaccuggggcugcucagccagcggacgcgcgacaucuacaucucccggcgccugcugggcaccuucaccuggacccucagcgacuccgagagcaacgagacgccgggcggguacugccugacccgguggaugcugaucgaggccgagcucaagugcuucggcaacaccgccguggccaagugcaacgagaagcacgacgaggaguucugcgacaugcugcgccuguucgacuucaacaagcaggcgauccggcgccucaaggccgaggcccagauguccauccagcugaucaacaaggccgugaacgcccugaucaacgaccagcucaucaugaagaaccaccuccgggacaucauggggauccccuacugcaacuacagcaaguacugguaccugaaccacaccgucacgggccgcaccucccugccccggugcuggcuggugagcaacggguccuaccugaacgagacccacuucagcgacgacaucgagcagcaggcggacaacaugaucaccgagcuccugcagaaggaguacauggaccgccagggcaagacgccccugggccucguggaccuguucgucuucuccaccagcuucuaccugaucuccaucuuccugcaccucgugaagaucccgugaggacuaguuauaagacugacuagcccgaugggccucccaacgggcccuccuccccuccuugcaccgagauuaaucaaaggcucuuuucagagccaccaaaaaaaaaaaaaaaaaaaaaaaaaaaaaaaaaaaaaaaaaaaaaaaaaaaaaaaaaaaaaaaaagaauu

SEQ ID NO: 42932 - RNA, 1541 nt, Artificial Sequence
  mRNA product Design i-3 (hSL-A64-N5) comprising derived and/or modified sequence from LASV(LASV035-NIG-2009;Clade II)__AIT17588__GPCmut13 (opt1)
aggagaaagcuuaccaugggccagaucaucaccuucuuccaggaggugccccacgucaucgaggaggugaugaacaucgugcugaucgcccucagccugcuggccauccucaaggggaucuacaacgucgcgaccugcggccuguucgggcugguguccuuccuccugcugugcggccgcagcugcuccacgaccuacaaggggguguacgagcuccagacccuggagcuggacauggccagccucaacaugaccaugccgcuguccugcacgaagaacaacagccaccacuacaucauggucggcaacgagaccggccuggagcucacccugaccaacacguccaucaucaaccacaaguucugcaaccugagcgacgcccacaagaagaaccucuacgaccacgcccugauguccaucaucagcaccuuccaccuguccauccccaacuucaaccaguacgaggccaugagcugcgacuucaacgggggcaagaucuccgugcaguacaaccucagccacgcguacgccguggacgccgccaaccacugcgggaccaucgcgaacggcguccugcagaccuucaugcggauggccuggggcggguccuacaucgcccuggacagcggcaagggguccugggacugcaucaugacgagcuaccaguaccucaucauccagaacaccaccugggaggaccacugccaguucucccgccccagccccaucggcuaccuggggcugcucagccagcggacccgcgacaucuacaucucccggcgccugcugggcacguucaccuggacccucagcgacuccgagggcaacgagacccccgggggcuacugccugacgcgguggaugcugaucgaggccgagcucaagugcuucgggaacaccgccguggcgaagugcaacgagaagcacgacgaggaguucugcgacaugcugcgccuguucgacuucaacaagcaggccauccggcgccucaaggccgaggcccagaugagcauccagcugaucaacaaggccgugaacgcgcugaucaacgaccagcucaucaugaagaaccaccuccgggacaucaugggcauccccuacugcaacuacuccaaguacugguaccugaaccacaccgucaccgggaagacgagccugccccgcugcuggcugguguccaacggcagcuaccugaacgagacccacuucuccgacgacaucgagcagcaggccgacaacaugaucaccgagcuccugcagaaggaguacaucgaccggcagggcaagaccccgcuggggcucguggaccuguucgucuucagcacguccuucuaccugaucagcaucuuccugcaccucgugaagaucccgugaggacuaguuauaagacugacuagcccgaugggccucccaacgggcccuccuccccuccuugcaccgagauuaaucaaaggcucuuuucagagccaccaaaaaaaaaaaaaaaaaaaaaaaaaaaaaaaaaaaaaaaaaaaaaaaaaaaaaaaaaaaaaaaaagaauu

SEQ ID NO: 42933 - RNA, 1541 nt, Artificial Sequence
  mRNA product Design i-3 (hSL-A64-N5) comprising derived and/or modified sequence from LASV(LASV1000-NIG-2009;Clade II)__AIT17782__GPCmut13 (opt1)
aggagaaagcuuaccaugggccagaucaucaccuucuuccaggaggugccccacgucaucgaggaggugaugaacaucgugcugaucgcccucagccugcuggccauccucaaggggaucuacaacgucgcgaccugcggccuguucgggcugguguccuuccuccugcugugcggccgcagcugcuccacgaccuacaaggggguguacgagcuccagacccuggagcuggacauggccagccucaacaugaccaugccgcuguccugcacgaagaacaacagccaccacuacaucauggucggcaacgagaccggccuggagcucacccugaccaacacguccaucaucaaccacaaguucugcaaccugagcgacgcccacaagaagaaccucuacgaccacgcccugauguccaucaucagcaccuuccaccuguccauccccaacuucaaccaguacgaggccaugagcugcgacuucaacgggggcaagaucuccgugcaguacaaccucagccacaccuacgcgguggacgccgccaaccacugcgggaccaucgccaacggcguccugcagacguucaugcggauggcguggggcggguccuacaucgcccuggacagcggcaagggguccugggacugcaucaugaccagcuaccaguaccucaucauccagaacaccaccugggaggaccacugccaguucucccgccccagccccaucggcuaccuggggcugcucagccagcggacgcgcgacaucuacaucucccggcgccugcugggcaccuucaccuggacccucagcgacuccgagggcaacgagacgcccgggggcuacugccugacccgguggaugcugaucgaggccgagcucaagugcuucgggaacaccgccguggccaagugcaacgagaagcacgacgaggaguucugcgacaugcugcgccuguucgacuucaacaagcaggcgaucaagcggcucaagaccgaggcccagaugagcauccagcugaucaacaaggccgugaacgcccugaucaacgaccagcucaucaugaagaaccaccuccgcgacaucaugggcauccccuacugcaacuacuccaaguacugguaccugaaccacacggucaccgggaagaccagccugccccggugcuggcugguguccaacggcagcuaccugaacgagacccacuucuccgacgacaucgagcagcaggccgacaacaugaucacggagcuccugcagaaggaguacaucgaccgccagggcaagaccccgcuggggcucguggaccuguucgucuucagcaccuccuucuaccugaucagcaucuuccugcaccucgugaagaucccgugaggacuaguuauaagacugacuagcccgaugggccucccaacgggcccuccuccccuccuugcaccgagauuaaucaaaggcucuuuucagagccaccaaaaaaaaaaaaaaaaaaaaaaaaaaaaaaaaaaaaaaaaaaaaaaaaaaaaaaaaaaaaaaaaagaauu

SEQ ID NO: 42934 - RNA, 1541 nt, Artificial Sequence
  mRNA product Design i-3 (hSL-A64-N5) comprising derived and/or modified sequence from LASV(LASV221-NIG-2010;Clade II)__AIT17624__GPCmut13 (opt1)
aggagaaagcuuaccaugggccagaucaucaccuucuuccaggaggugccccacgucaucgaggaggugaugaacaucgugcugaucgcccucagccugcuggccauccucaaggggaucuacaacgucgcgaccugcggccuguucgggcugguguccuuccuccugcugugcggccgcagcugcuccacgaccuacaaggggguguacgagcuccagacccuggagcuggacauggccagccucaacaugaccaugccgcuguccugcacgaagaacaacagccaccacuacaucauggucggcaacgagaccggccuggagcucacccugaccaacacguccaucaucaaccacaaguucugcaaccugagcgacgcccacaagaagaaccucuacgaccacgcccugauguccaucaucagcaccuuccaccuguccauccccaacuucaaccaguacgaggccaugagcugcgacuucaacgggggcaagaucuccgugcaguacaaccucagccacaccuacgcgaucgacgccgccaaccacugcgggaccaucgccaacggcgugcugcagacguucaugcggauggcguggggcggguccuacaucgcccuggacagcggcaagggguccugggacugcaucaugaccagcuaccaguaccucaucauccagaacaccaccugggaggaccacugccaguucucccgccccagccccaucggcuaccuggggcugcucagccagcggacgcgcgacaucuacaucucccggcgccugcugggcaccuucaccuggacccucagcgacuccgagggcaacgagacgcccgggggcuacugccugacccgguggaugcugaucgaggccgagcucaagugcuucgggaacaccgccgucgccaagugcaacgagaagcacgacgaggaguucugcgacaugcugcgccuguucgacuucaacaagcaggcgauccggcgccucaagaccgaggcccagaugagcauccagcugaucaacaaggccgugaacgcccugaucaacgaccagcucaucaugaagaaccaccuccgggacaucaugggcauccccuacugcaacuacuccaaguacugguaccugaaccacacggugaccgggaagaccagccugccccgcugcuggcuggucuccaacggcagcuaccugaacgagacccacuucuccgacgacaucgagcagcaggccgacaacaugaucacggagaugcuccagaaggaguacauggaccggcagggcaagaccccgcuggggcugguggaccucuucguguucagcaccuccuucuaccugaucagcaucuuccugcaccuggucaagaucccgugaggacuaguuauaagacugacuagcccgaugggccucccaacgggcccuccuccccuccuugcaccgagauuaaucaaaggcucuuuucagagccaccaaaaaaaaaaaaaaaaaaaaaaaaaaaaaaaaaaaaaaaaaaaaaaaaaaaaaaaaaaaaaaaaagaauu

SEQ ID NO: 42935 - RNA, 1541 nt, Artificial Sequence
  mRNA product Design i-3 (hSL-A64-N5) comprising derived and/or modified sequence from LASV(LASV237-NIG-2010;Clade II)__AIT17638__GPCmut13 (opt1)
aggagaaagcuuaccaugggccagaucaucaccuucuuccaggaggugccccacgucaucgaggaggugaugaacaucgugcugaucgcccucagccugcuggccauccucaaggggaucuacaacgucgcgaccugcggccuguucgggcugguguccuuccuccugcugugcggccgcagcugcuccacgaccuacaaggggguguacgagcuccagacccuggagcuggacauggccagccucaacaugaccaugccgcuguccugcacgaagaacaacagccaccacuacaucauggucggcaacgagaccggccuggagcucacccugaccaacacguccaucaucaaccacaaguucugcaaccugagcgacgcccacaagaaggaccucuacgaccacgcccugauguccaucaucagcaccuuccaccuguccauccccaacuucaaccaguacgaggccaugagcugcgacuucaacgggggcaagaucuccgugcaguacaaccucagccacaccuacgcgguggacgccgccaaccacugcgggaccaucgccaacggcguccugcagacguucaugcggauggcguggggcggguccuacaucgcccuggacagcggcaagggguccugggacugcaucaugaccagcuaccaguaccucaucauccagaacaccaccugggaggaccacugccaguucucccgccccagccccaucggcuaccuggggcugcucagccagcggacgcgcgacaucuacaucucccggcgccugcugggcaccuucaccuggacccucagcgacuccgagggcaacgagacgcccgggggcuacugccugacccgguggaugcugaucgaggccgagcucaagugcuucgggaacaccgccguggccaagugcaacgagaagcacgacgaggaguucugcgacaugcugcgccuguucgacuucaacaagcaggcgauccggcgccucaagaccgaggcccagaugagcauccagcugaucaacaaggccgugaacgcccugaucaacgaccagcucaucaugaagaaccaccuccgggacaucaugggcauccccuacugcaacuacuccaaguacugguaccugaaccacacggucaccgggaagaccagccugccccgcugcuggcugguguccaacggcagcuaccugaacgagacccacuucuccgacgacaucgagcagcaggccgacaacaugaucacggagcuccugcagaaggaguacauggaccggcagggcaagaccccgcuggggcucguggaccuguucgucuucagcaccuccuucuaccugaucagcaucuuccugcaccucaucaagaucccgugaggacuaguuauaagacugacuagcccgaugggccucccaacgggcccuccuccccuccuugcaccgagauuaaucaaaggcucuuuucagagccaccaaaaaaaaaaaaaaaaaaaaaaaaaaaaaaaaaaaaaaaaaaaaaaaaaaaaaaaaaaaaaaaaagaauu

SEQ ID NO: 42936 - RNA, 1541 nt, Artificial Sequence
  mRNA product Design i-3 (hSL-A64-N5) comprising derived and/or modified sequence from LASV(LASV253-NIG-2011;Clade II)__AIT17670__GPCmut13 (opt1)
aggagaaagcuuaccaugggccagaucaucaccuucuuccaggaggugccccacgucaucgaggaggugaugaacaucgugcugaucgcccucagccugcuggccauccucaaggggaucuacaacgucgcgaccugcggccuguucgggcugguguccuuccuccugcugugcggccgcagcugcuccacgaccuacaaggggguguacgagcuccagacccuggagcuggacauggccagccucaacaugaccaugccgcuguccugcacgaagaacaacagccaccacuacaucauggucggcaacgagaccggccuggagcucacccugaccaacacguccaucaucaaccacaaguucugcaaccugagcgacgcccacaagaagaaccucuacgaccacgcccugauguccaucaucagcaccuuccaccuguccauccccaacuucaaccaguacgaggccaugagcugcgacuucaacgggggcaagaucuccgugcaguacaaccucagccacaccuacgcgguggacgccgccaaccacugcgggaccaucgccaacggcguccugcagacguucaugcggauggcguggggcggguccuacaucgcccuggacagcggcaagggguccugggacugcaucaugaccagcuaccaguaccucaucauccagaacaccaccugggaggaccacugccaguucucccgccccagccccaucggcuaccuggggcugcucagccagcggacgcgcgacaucuacaucucccggcgccugcugggcaccuucaccuggacccucagcgacuccgagggcaacgagacgcccgggggcuacugccugacccgguggaugcugaucgaggccgagcucaagugcuucgggaacaccgccguggccaagugcaacgagaagcacgacgaggaguucugcgacaugcugcgccuguucgacuucaacaagcaggcgauccggcgccucaaggccgaggcccagaugagcauccagcugaucaacaaggccgugaacgcccugaucaacgaccagcucaucaugaagaaccaccuccgggacaucaugggcaucccguacugcaacuacuccaaguacugguaccugaaccacaccgucacggggcgcaccagccugccccggugcuggcugguguccaacggcagcuaccugaacgagacccacuucuccgacgacaucgagcagcaggcggacaacaugaucaccgagcuccugcagaaggaguacaucgaccgccagggcaagacgccccuggggcucguggaccuguucgucuucagcaccuccuucuaccugaucagcaucuuccugcaccucgugaagaucccgugaggacuaguuauaagacugacuagcccgaugggccucccaacgggcccuccuccccuccuugcaccgagauuaaucaaaggcucuuuucagagccaccaaaaaaaaaaaaaaaaaaaaaaaaaaaaaaaaaaaaaaaaaaaaaaaaaaaaaaaaaaaaaaaaagaauu

SEQ ID NO: 42937 - RNA, 1541 nt, Artificial Sequence
  mRNA product Design i-3 (hSL-A64-N5) comprising derived and/or modified sequence from LASV(LASV254-NIG-2011;Clade II)__AIT17674__GPCmut13 (opt1)
aggagaaagcuuaccaugggccagaucaucaccuucuuccaggaggugccccacgucaucgaggaggugaugaacaucgugcugaucgcccucagccugcuggccauccucaaggggaucuacaacgucgcgaccugcggccuguucgggcugguguccuuccuccugcugugcggccgcagcugcuccacgaccuacaaggggguguacgagcuccagacccuggagcuggacaugaccaaccucaacaugacgaugccgcugagcugcaccaagaacaacucccaccacuacaucauggucggcaacgagaccggccuggagcucacccugacgaacaccagcaucaucaaccacaaguucugcaaccuguccgacgcccacaagaagaaccucuacaaccacgcccugaugagcaucaucuccaccuuccaccugagcauccccaacuucaaccaguacgaggccauguccugcgacuucaacgggggcaagaucagcgugcaguacaaccucucccacagcuacgccguggacgcggccaaccacugcgggaccaucgccaacggcguccugcagacguucaugcggauggccuggggcggguccuacaucgcgcuggacagcggcaaggggaacugggacugcaucaugaccuccuaccaguaccucaucauccagaacaccaccugggaggaccacugccaguucagccgccccucccccaucggcuaccuggggcugcucagccagcggacgcgcgacaucuacaucagccggcgccugcugggcaccuucaccuggacccucuccgacagcgagggcaacgagacgcccgggggcuacugccugacccgguggaugcugaucgaggccgagcucaagugcuucgggaacaccgccguggccaagugcaacgagaagcacgacgaggaguucugcgacaugcugcgccuguucgacuucaacaagcaggccauccggcgccucaagaccgaggcgcaggccaacauccagcugaucaacaaggccgugaacgcccugaucaacgaccagcucaucaugaagaaccaccuccgggacaucaugggcauccccuacugcaacuacuccaaguacugguaccugaaccacacggucaccgggaagaccagccugccccgcugcuggcugguguccaacggcagcuaccugaacgagacccacuucuccgacgacaucgagcagcaggccgacaacaugaucacggagcuccugcagaaggaguacauggaccggcagggcaagaccccgcuggggcucguggaccuguucgucuucagcaccuccuucuaccugaucagcaucuuccugcaccucgugaagaucccgugaggacuaguuauaagacugacuagcccgaugggccucccaacgggcccuccuccccuccuugcaccgagauuaaucaaaggcucuuuucagagccaccaaaaaaaaaaaaaaaaaaaaaaaaaaaaaaaaaaaaaaaaaaaaaaaaaaaaaaaaaaaaaaaaagaauu

SEQ ID NO: 42938 - RNA, 1541 nt, Artificial Sequence
  mRNA product Design i-3 (hSL-A64-N5) comprising derived and/or modified sequence from LASV(Nig08-A19;Clade III)__ADU56618__GPCmut13 (opt1)
aggagaaagcuuaccaugggccagaucgugaccuucuuccaggaggucccccacgugaucgaggaggugaugaacaucguccugaucgcccucagcauccuggccauccugaaggggcucuacaacaucgcgaccugcggccugaucgggcuggugacguuccuccugcuguccggccgcagcugcuccaugaccuacaaggggguguacgagcuccagacccuggagcugaacaugaacacccucaacaugacgaugccgcugagcugcaccaagaacaacucccaccacuacaucauggucggcaacgagaccggccuggagcucacccugacgaacaccagccugcuccaccacaaguucugcaaccuguccgacgcccacaagaagaaccuguacgaccacacccucaugagcaucaucuccaccuuccaccugagcauccccaacuucaaccaguacgaggccauguccugcgacuucaacgggggcaagaucacggugcaguacaaccugagccacuccuacgccaucgacgccgcgaaccacugcgggaccguggccaacggcguccuccagaccuucaugcggauggccuggggcgggagcuacaucgcccuggacuccggccgcgggaagugggacugcaucaugaccagcuaccaguaccugaucauccagaacacgaccugggaggaccacugccaguucucccggcccagccccaucggcuaccucgggcugcugucccagcgcacccgggacaucuacaucagccgccggcuccugggcaccuucacguggacccugagcgacuccgagggcaacgagacccccgggggcuacugccucacccgcuggaugcugaucgaggcggagcugaagugcuucgggaacacggccguggccaagugcaacgagaagcacgacgaggaguucugcgacaugcuccggcuguucgacuucaacaagcaggccauccgccggcugaaggccgaggcgcagaugagcauccagcucaucaacaaggccgugaacgcccugaucaacgaccagcugaucaugaagaaccaccuccgcgacaucaugggcauccccuacugcaacuacuccaaguacugguaccugaaccacaccagcaccgggcggaccucccugccccgcugcuggcucgucagcaacggcuccuaccugaacgagacgcacuucagcgacgacaucgagcagcaggccgacaacaugaucaccgagaugcugcagaaggaguaccucgaccggcagggcaagaccccgcuggggcugguggaccuguucguguucuccaccagcuucuaccucaucuccaucuuccugcaccuggucaagaucccgugaggacuaguuauaagacugacuagcccgaugggccucccaacgggcccuccuccccuccuugcaccgagauuaaucaaaggcucuuuucagagccaccaaaaaaaaaaaaaaaaaaaaaaaaaaaaaaaaaaaaaaaaaaaaaaaaaaaaaaaaaaaaaaaaagaauu

SEQ ID NO: 42939 - RNA, 1544 nt, Artificial Sequence
  mRNA product Design i-3 (hSL-A64-N5) comprising derived and/or modified sequence from LASV(G1180-SLE-2010;Clade IV)__AIT17168__GPCmut13 (opt1)
aggagaaagcuuaccaugggccagaucgugaccuucuuccaggaggucccccacgugaucgaggaggugaugaacaucguccugaucgcccucagcauccuggccgugcugaaggggcucuacaacuucgcgaccugcggccugguggggcugcucaccuuccugcugcucugcggccgcuccugcaccgccagccgguacaagggggucuacgagcugcagacccuggagcucaacauggagacccugaacaugacgaugccgcuguccugcaccaagaacaacagccaccacuacaucauggugggcaacgagaccggccucgagcugacccugacgaacaccuccaucaucaaccacaaguucugcaaccucagcgacgcccacaagaagaaccuguacgaccacgcccugauguccaucaucagcaccuuccaccucuccauccccaacuucaaccaguacgaggccaugagcugcgacuucaacgggggcaagaucuccgugcaguacaaccugagccacuccuacgcgggggacgccgccaaccacugcggcaccgucgccaacggggugcugcagacguucaugcgcauggcguggggcggcagcuacaucgcccucgacuccgggcacggcagcugggacugcaucaugaccuccuaccaguaccugaucauccagaacaccaccugggaggaccacugccaguucagccggcccucccccaucggguaccugggccuccugagccagcgcacgcgggacaucuacaucagccgccggcugcucggcaccuucaccuggacccuguccgacagcgaggggaaggacacgccgggcggguacugccugacccgcuggaugcucaucgaggccgagcugaagugcuucggcaacaccgccguggccaagugcaacgagaagcacgacgaggaguucugcgacaugcugcggcuguucgacuucaacaagcaggcgauccagcgccugaaggccgaggcccagauguccauccagcugaucaacaaggccgucaacgcccucaucaacgaccagcugaucaugaagaaccaccuccgggacaucauggggauccccuacugcaacuacagcaaguacugguaccucaaccacaccacgaccggcaagaccucccugcccaagugcuggcuggugagcaacggcuccuaccucaacgagacccacuucagcgacgacaucgagcagcaggcggacaacaugaucacggagaugcugcagaaggaguacauggagcgccaggggaagacgccccugggccucguggaccuguucgucuucuccaccagcuucuaccugaucuccaucuuccugcaccucgugaagaucccgugaggacuaguuauaagacugacuagcccgaugggccucccaacgggcccuccuccccuccuugcaccgagauuaaucaaaggcucuuuucagagccaccaaaaaaaaaaaaaaaaaaaaaaaaaaaaaaaaaaaaaaaaaaaaaaaaaaaaaaaaaaaaaaaaagaauu

SEQ ID NO: 42940 - RNA, 1544 nt, Artificial Sequence
  mRNA product Design i-3 (hSL-A64-N5) comprising derived and/or modified sequence from LASV(G1442-SLE-2011;Clade IV)__AIT17180__GPCmut13 (opt1)
aggagaaagcuuaccaugggccagaucgugaccuucuuccaggaggucccccacgugaucgaggaggugaugaacaucguccugaucgcccucagcauccuggccgugcugaaggggcucuacaacguggcgaccugcggccugaucgggcuggucacguuccuccugcugugcggccgcuccugcaccaccacccucuacaaggggguguacgagcugcagacgcuggagcucaacauggagacccugaacaugaccaugccgcugagcugcaccaagaacaacucccaccacuacauccgggugggcaacgagacgggccucgagcugacccugaccaacaccagcaucaucaaccacaaguucugcaaccucuccgacgcccacaagaagaaccuguacgaccacgcccugaugagcaucaucuccacguuccaccucagcauccccaacuucaaccaguacgaggccauguccugcgacuucaacgggggcaagaucagcguccaguacaaccugucccacagcuacgccggggacgcggccaaccacugcggcaccguggccaacggggugcugcagaccuucaugcgcauggccuggggcggcuccuacaucgcgcucgacagcgggcggggcaacugggacugcaucaugaccuccuaccaguaccugaucauccagaacacgaccugggacgaccacugccaguucagccgccccucccccaucggguaccugggccuccugagccagcggacccgcgacgucuacaucucccggcgccugcucggcaccuucacguggacccugagcgacagcgaggggaaggacaccccgggcggguacugccugacccgguggaugcucaucgaggccgagcugaagugcuucggcaacacggccguggccaagugcaacgagaagcacgacgaggaguucugcgacaugcugcgccucuucgacuucaacaagcaggccauccagcggcugaaggcggaggcccagauguccauccagcugaucaacaaggccgugaacgcccucaucaacgaccagcugaucaugaagaaccaccuccgcgacaucauggggauccccuacugcaacuacagcaaguacugguaccugaacaacaccgccaccggcaagaccucccugcccaagugcuggcugaucagcaacggcuccuaccucaacgagacgcacuucagcgacgacaucgagcaggaggcggacaacaugaucaccgagaugcugcagaaggaguacauggagcggcaggggaagacgccccugggccucgucgaccuguucguguucuccaccagcuucuaccugaucuccaucuuccugcaccucgugaagaucccgugaggacuaguuauaagacugacuagcccgaugggccucccaacgggcccuccuccccuccuugcaccgagauuaaucaaaggcucuuuucagagccaccaaaaaaaaaaaaaaaaaaaaaaaaaaaaaaaaaaaaaaaaaaaaaaaaaaaaaaaaaaaaaaaaagaauu

SEQ ID NO: 42941 - RNA, 1544 nt, Artificial Sequence
  mRNA product Design i-3 (hSL-A64-N5) comprising derived and/or modified sequence from LASV(G3010-SLE-2013;Clade IV)__AIT17344__GPCmut13 (opt1)
aggagaaagcuuaccaugggccagaucgugaccuucuuccaggaggucccccacgugaucgaggaggugaugaacaucguccugaucgcccucagcauccuggccgugcugaaggggcucuacaacuucgcgaccugcggccugguggggcuggucacguuccuccugcugugcggccgcuccugcaccaccagccucuacaaggggguguacgagcugcagacccuggagcucaacauggagacgcugaacaugaccaugccgcuguccugcaccaagaacaacagccaccacuacaucauggugggcaacgagaccggccucgagcugacgcugaccaacaccuccaucaucaaccacaaguucugcaaccucagcgacgcccacaagaagaaccuguacaaccacgcccugauguccaucaucagcaccuuccaccucuccauccccaacuucaaccaguacgaggccaugagcugcgacuucaacgggggcaagaucuccguccaguacaaccugagccacuccuacgccggggacgcggccagccacugcggcacgguggccaacggggugcugcagaccuucaugcggauggccuggggcggcuccuacaucgcgcucgacagcggguacggcaagugggacugcaucaugaccuccuaccaguaccugaucauccagaacaccacgugggaggaccacugccaguucagccgccccucccccaucggguaccugggccuccugagccagcggacccgcgacaucuacaucagccggcgccugcucggcaccuucaccuggacgcuguccgacagcgaggggaaggacaccccgggcggguacugccugacccgguggaugcucaucgaggccgagcugaagugcuucggcaacaccgccgucgccaagugcaacgagaagcacgacgaggaguucugcgacaugcugcgccucuucgacuucaacaagcaggccauccagcggcugaagacggaggcgcagauguccauccagcugaucaacaaggccgugaacgcccucaucaacgaccagcugaucaugaagaaccaccuccgcgacaucauggggauccccuacugcaacuacagcaaguacugguaccugaaccacaccaccaccggcaagacgucccugcccaagugcuggcuggugagcaacggcuccuaccucaacgagacccacuucagcgacgacaucgagcagcaggccgacaacaugaucaccgagaugcugcagaaggaguacauggagcggcaggggaagacgccccugggccucgucgaccuguucguguucuccaccagcuucuaccugaucuccaucuuccugcaccucgugaagaucccgugaggacuaguuauaagacugacuagcccgaugggccucccaacgggcccuccuccccuccuugcaccgagauuaaucaaaggcucuuuucagagccaccaaaaaaaaaaaaaaaaaaaaaaaaaaaaaaaaaaaaaaaaaaaaaaaaaaaaaaaaaaaaaaaaagaauu

SEQ ID NO: 42942 - RNA, 1544 nt, Artificial Sequence
  mRNA product Design i-3 (hSL-A64-N5) comprising derived and/or modified sequence from LASV(G502-SLE-2009;Clade IV)__AIT17126__GPCmut13 (opt1)
aggagaaagcuuaccaugggccagaucgugaccuucuuccaggaggucccccacgugaucgaggaggugaugaacaucguccugaucgcccucagcauccuggccgugcugaaggggcucuacaacuucgcgaccugcggccugguggggcugcucacguuccugcugcucugcggccgcuccugcaccaccgggcuguacaagggcgucuacgagcugcagacccucgagcugaacauggagacgcugaacaugaccaugccgcucagcugcaccaagaacaacucccaccacuacaucauggugggcaacgagaccgggcuggagcugacgcucaccaacaccagcaucaucaaccacaaguucugcaaccuguccgacgcccacaagaagaaccuguacgaccacgcccucaugagcaucaucuccaccuuccaccugagcauccccaacuucaaccaguacgaggccauguccugcgacuucaacggcgggaagaucagcgugcaguacaaccugucccacagcuacgccggcgacgcggccgaccacugcgggacggucgccaacggcgugcuccagaccuucaugcggauggccuggggcggguccuacaucgcgcuggacagcggccgcgggcggugggacugcaucaugaccuccuaccaguaccugaucauccagaacaccacgugggaggaccacugccaguucagccgccccucccccaucggcuaccucggccugcugagccagcggacccgcgacaucuacaucucccggcgccuccuggggaccuucaccuggacgcugagcgacagcgagggcaaggacacccccgggggcuacugccucacccgguggaugcugaucgaggccgagcugaagugcuucgggaacaccgccguggccaagugcaacgagaagcacgacgaggaguucugcgacaugcuccgccuguucgacuucaacaagcaggccauccagcggcugaaggcggaggcccagauguccauccagcucaucaacaaggccgucaacgcccugaucaacgaccagcuggugaugaagaaccaccuccgcgacaucaugggcauccccuacugcaacuacagccgguacugguaccugaaccacacgaccaccggccgcaccucccugcccaagugcuggcucgugagcaacggguccuaccugaacgagacgcacuucagcgacgacaucgagcagcaggccgacaacaugaucaccgagaugcugcagaaggaguacauggagcggcagggcaagaccccgcucgggcuggucgaccuguucguguucuccaccagcuucuaccugaucuccaucuuccuccaccuggugaagaucccgugaggacuaguuauaagacugacuagcccgaugggccucccaacgggcccuccuccccuccuugcaccgagauuaaucaaaggcucuuuucagagccaccaaaaaaaaaaaaaaaaaaaaaaaaaaaaaaaaaaaaaaaaaaaaaaaaaaaaaaaaaaaaaaaaagaauu

SEQ ID NO: 42943 - RNA, 1544 nt, Artificial Sequence
  mRNA product Design i-3 (hSL-A64-N5) comprising derived and/or modified sequence from LASV(G733-SLE-2010;Clade IV)__AIT17154__GPCmut13 (opt1)
aggagaaagcuuaccaugggccagaucgugaccuucuuccaggaggucccccacgugaucgaggaggugaugaacaucguccugaucgcccucagcauccuggccgugcugaaggggcucuacaacuucgcgaccugcggcaucguggggcuggucuccuuccugcuccugugcggccgcagcugcacgaccucccuguacaaggggguguacgagcuccagacccuggagcugaacauggagacccucaacaugacgaugccgcugagcugcaccaagaacaacucccaccacuacaucauggugggcaacgagaccggccuggagcucacccugacgaacaccagcaucaucaaccacaaguucugcaaccuguccgacgcccacaagaagaaccucuacgaccacgcccugaugagcaucaucuccaccuuccaccugagcauccccaacuucaaccaguacgaggccauguccugcgacuucaacgggggcaagaucagcguccaguacaaccucucccacagcuacgccggggacgcggccaaccacugcggcaccaucgccaacggggugcugcagacguucaugcggauggccuggggcggcuccuacaucgcgcuggacagcgggcgcgaccggugggacugcaucaugaccuccuaccaguaccucaucauccagaacaccaccugggaggaccacugccaguucagccgccccucccccaucggcuaccuggggcugcucagccagcggacgcgcgacaucuacaucagccggcgccugcugggcaccuucaccuggacccucuccgacagcgagggcaaggacacgcccgggggcuacugccugacccgguggaugcugaucgaggccgagcucaagugcuucgggaacaccgccguggccaagugcaacgagaagcacgacgaggaguucugcgacaugcugcgccuguucgacuucaacaagcaggccauccagcggcucaaggcggaggcccagauguccauccagcugaucaacaaggccgucaacgcccugaucaacgaccagcucaucaugaagaaccaccuccgcgacaucaugggcauccccuacugcaacuacagcaaguacugguaccugaaccacaccacgaccgggaagaccucccugcccaagugcuggcuggugagcaacggcuccuaccugaacgagacccacuucagcgacgacaucgagcagcaggccgacaacaugaucacggagaugcuccagaaggaguacauggagcggcagggcaagaccccgcuggggcugguggaccucuucgucuucuccaccagcuucuaccugaucuccaucuuccugcaccuggugaagaucccgugaggacuaguuauaagacugacuagcccgaugggccucccaacgggcccuccuccccuccuugcaccgagauuaaucaaaggcucuuuucagagccaccaaaaaaaaaaaaaaaaaaaaaaaaaaaaaaaaaaaaaaaaaaaaaaaaaaaaaaaaaaaaaaaaagaauu

SEQ ID NO: 42944 - RNA, 1544 nt, Artificial Sequence
  mRNA product Design i-3 (hSL-A64-N5) comprising derived and/or modified sequence from MOPV/LASV reassortant(IGS-1;Clade IV)__AFY05576__GPCmut13 (opt1)
aggagaaagcuuaccaugggccagaucgugaccuucuuccaggaggucccccacgugaucgaggaggugaugaacaucguccugaucgcccucagcgugcuggccgugcugaaggggcucuacaacuucgcgaccugcggccuggucgggcuggugacguuccuccugcugugcggccgcuccugcaccaccagccucuacaaggggguguacgagcugcagacccuggagcucaacauggagacgcugaacaugaccaugccgcuguccugcaccaagaacaacagccaccacuacaucauggucggcaacgagaccggccucgagcugacgcugaccaacaccuccaucaucaaccacaaguucugcaaccucagcgacgcccacaagaagaaccuguacgaccacgcccugauguccaucaucagcaccuuccaccucuccauccccaacuucaaccaguacgaggccaugagcugcgacuucaacgggggcaagaucuccgugcaguacaaccugagccacuccuacgccggggacgcggccaaccacugcggcacgguggccaacgggguccugcagaccuucaugcggauggccuggggcggcagcuacaucgcgcucgacuccgggcgcggcaacugggacugcaucaugaccagcuaccaguaccugaucauccagaacaccacgugggaggaccacugccaguucucccggcccagccccaucggguaccugggccuccugucccagcgcacccgggacaucuacaucagccgccggcugcucggcaccuucaccuggacgcugagcgacuccgagggggaggacaccccgggcggguacugccugacccgcuggaugcucaucgaggccgagcugaagugcuucggcaacaccgccguggccaagugcaacgagaagcacgacgaggaguucugcgacaugcugcggcuguucgacuucaacaagcaggccauccagcgccugaaggcggaggcccagaugagcauccagcugaucaacaaggccgugaacgcccucaucaacgaccagcugaucaugaagaaccaccuccgggacaucauggggauccccuacugcaacuacuccaaguacugguaccucaaccacacgaccaccggccgcaccagccugcccaagugcuggcuggucuccaacggcagcuaccucaacgagacgcacuucuccgacgacaucgagcagcaggccgacaacaugaucaccgagaugcugcagaaggaguacauggagcggcaggggaagacgccccugggccucguggaccuguucguguucagcaccuccuucuaccugaucagcaucuuccugcaccucgucaagaucccgugaggacuaguuauaagacugacuagcccgaugggccucccaacgggcccuccuccccuccuugcaccgagauuaaucaaaggcucuuuucagagccaccaaaaaaaaaaaaaaaaaaaaaaaaaaaaaaaaaaaaaaaaaaaaaaaaaaaaaaaaaaaaaaaaagaauu

SEQ ID NO: 42945 - RNA, 1544 nt, Artificial Sequence
  mRNA product Design i-3 (hSL-A64-N5) comprising derived and/or modified sequence from LASV(LM765-SLE-2012;Clade IV)__AIT17814__GPCmut13 (opt1)
aggagaaagcuuaccaugggccagaucgugaccuucuuccaggaggucccccacgugaucgaggaggugaugaacaucguccugaucgcccucagcauccuggccgugcugaaggggcucuacaacuucgcgaccugcggccugguggggcuggucacguuccuccugcugugcggccgcuccugcaccaccagccucuacaaggggguguacgagcugcagacccuggagcucaacauggagacgcugaacaugaccaugccgcuguccugcaccaagaacaacagccaccacuacaucauggugggcaacgagaccggccucgagcugacgcugaccaacaccuccaucaucgaccacaaguucugcaaccucagcgacgcccaccggaagaaccuguacgaccacgcccugauguccaucaucagcaccuuccaccucuccauccccaacuucaaccaguacgaggccaugagcugcgacuucaacgggggcaagaucuccguccaguacaaccugagccacuccuacgccaaggacgcggccgaccacugcgggacgguggccaacggcgugcugcagaccuucaugcgcauggccuggggcgggagcuacaucgcgcucgacuccggccgggggcgcugggacugcaucaugaccagcuaccaguaccugaucauccagaacaccacgugggaggaccacugccaguucucccggcccagccccaucggcuaccuggggcuccugucccagcgcacccgggacaucuacaucagccgccggcugcucggcaccuucaccuggacgcugagcgacuccgagggcaaggacacccccgggggcuacugccugacccgcuggaugcucaucgaggccgagcugaagugcuucgggaacaccgccgucgccaagugcaacgagaagcacgacgaggaguucugcgacaugcugcggcuguucgacuucaacaagcaggccauccagcgccugaaggcggaggcccagaugagcauccagcugaucaacaaggccgugaacgcccucaucaacgaccagcugaucaugaagaaccaccuccgggacaucaugggcauccccuacugcaacuacuccaaguacugguaccucaaccacacgaccaccgggaagaccagccugcccaagugcuggcugguguccaacggcagcuaccucaacgagacgcacuucuccgacgacaucgagcagcaggccgacaacaugaucaccgagaugcugcagaaggaguacauggagcgccagggcaagaccccgcuggggcucgucgaccuguucguguucagcaccuccuucuaccugaucagcaucuuccugcaccucgugaagaucccgugaggacuaguuauaagacugacuagcccgaugggccucccaacgggcccuccuccccuccuugcaccgagauuaaucaaaggcucuuuucagagccaccaaaaaaaaaaaaaaaaaaaaaaaaaaaaaaaaaaaaaaaaaaaaaaaaaaaaaaaaaaaaaaaaagaauu

SEQ ID NO: 42946 - RNA, 1544 nt, Artificial Sequence
  mRNA product Design i-3 (hSL-A64-N5) comprising derived and/or modified sequence from LASV(LM776-SLE-2012;Clade IV)__AIT17824__GPCmut13 (opt1)
aggagaaagcuuaccaugggccagaucgugaccuucuuccaggaggucccccacgugaucgaggaggugaugaacaucguccugaucgcccucagcauccuggccgugcugaaggggcucuacaacuucgcgaccugcggccugguggggcuggucacguuccuccugcugugcggccgcuccugcaccaccagcguguacaaggggguguacgagcuccagacccuggagcugaacauggagacgcucaacaugaccaugccgcuguccugcaccaagaacaacagccaccacuacaucauggucggcaacgagaccggccuggagcucacgcugaccaacaccuccaucaucaaccacaaguucugcaaccugagcgacgcccacaagaagaaccucuacgaccacgcccugauguccaucaucagcaccuuccaccuguccauccccaacuucaaccaguacgaggccaugagcugcgacuucaacgggggcaagaucuccgugcaguacaaccucagccacuccuacgccggggacgcggccaaccacugcggcacgguggccaacgggguccugcagaccuucaugcggauggccuggggcggcagcuacaucgcgcuggacuccgggcacggcaagugggacugcaucaugaccagcuaccaguaccucaucauccagaacaccacgugggaggaccacugccaguucucccgccccagccccaucggguaccugggccugcucucccagcggacccgcgacaucuacaucagccggcgccugcugggcaccuucaccuggacgcucagcgacuccgaggggaaggacaccccgggcggguacugccugacccgguggaugcugaucgaggccgagcucaagugcuucggcaacaccgccguggccaagugcaacgagaagcacgacgaggaguucugcgacaugcugcgccuguucgacuucaacaagcaggccauccagcggcucaaggcggaggcccagaugagcauccagcugaucaacaaggccgugaacgcccugaucaacgaccagcucaucaugaagaaccaccuccgcgacaucauggggauccccuacugcaacuacuccaaguacugguaccugaaccacacgaccaccggcaagaccagccugcccaagugcuggcuggucuccaacggcagcuaccugaacgagacgcacuucuccgacgacaucgagcagcaggccgacaacaugaucaccgagaugcuccagaaggaguacauggagcggcaggggaagacgccccugggccugguggaccucuucguguucagcaccuccuucuaccugaucagcaucuuccugcaccuggucaagaucccgugaggacuaguuauaagacugacuagcccgaugggccucccaacgggcccuccuccccuccuugcaccgagauuaaucaaaggcucuuuucagagccaccaaaaaaaaaaaaaaaaaaaaaaaaaaaaaaaaaaaaaaaaaaaaaaaaaaaaaaaaaaaaaaaaagaauu

SEQ ID NO: 42947 - RNA, 1544 nt, Artificial Sequence
  mRNA product Design i-3 (hSL-A64-N5) comprising derived and/or modified sequence from LASV(Mad39;Clade IV)__ANH09722__GPCmut13 (opt1)
aggagaaagcuuaccaugggccagaucgugaccuucuuccaggaggucccccacgugaucgaggaggugaugaacaucguccugaucgcccucagcauccuggccgugcugaaggggcucuacaacguggcgaccugcggccugaucgggcuggucacguuccuccugcugugcggccgcuccugcaccaccacccucuacaaggggguguacgagcugcaggcccuggagcucaacauggagacgcugaacaugaccaugccgcugagcugcaccaagaacaacucccaccacuacauccgggugggcaacgagaccggccucgagcugacgcugaccaacaccagccucaucaaccacaaguucugcaaccuguccgacgcccacaagaagaaccuguacgaccacgcccucaugagcaucaucuccaccuuccaccugagcauccccaacuucaaccaguacgaggccauguccugcgacuucaacgacgggaagaucagcguccaguacaaccugucccacacguacgcgggcgacaccgccaaccacugcgggaccguggccaacggcgugcuccagaccuucaugcgcauggccuggggcgggagcuacaucgcgcuggacuccggccgcgggggcugggacugcaucaugacgagcuaccaguaccugaucauccagaacaccaccugggaggaccacugccaguucucccggcccagccccaucggguaccucggccugcugucccagcggacccgcgacaucuacaucagccggcgccuccugggcacguucaccuggacccuguccgacagcgaggggaaggacaccccgggcggguacugccucacgcgguggaugcugaucgaggccgagcugaagugcuucggcaacaccgccgucgccaagugcaacgagaagcacgacgaggaguucugcgacaugcuccgccuguucgacuucaacaagcaggccauccagcggcugaaggcggaggcccagaugagcauccagcucaucaacaaggccgugaacgcccugaucaacgaccagcugaucaugaagaaccaccuccgcgacaucauggggauccccuacugcaacuacuccaaguacugguaccugaaccacaccgugaccggcaagacgagccugcccaagugcuggcucgucuccaacggcagcuaccugaacgagacccacuucuccgacgacaucgagcagcaggccgacaacaugaucaccgagaugcugcagaaggaguacauggagcggcaggggaagacgccccucggccugguggaccuguucguguucagcaccuccuucuaccugaucagcaucuuccuccaccuggucaagaucccgugaggacuaguuauaagacugacuagcccgaugggccucccaacgggcccuccuccccuccuugcaccgagauuaaucaaaggcucuuuucagagccaccaaaaaaaaaaaaaaaaaaaaaaaaaaaaaaaaaaaaaaaaaaaaaaaaaaaaaaaaaaaaaaaaagaauu

SEQ ID NO: 42948 - RNA, 1544 nt, Artificial Sequence
  mRNA product Design i-3 (hSL-A64-N5) comprising derived and/or modified sequence from LASV(Z0947-SLE-2011;Clade IV)__AIT17840__GPCmut13 (opt1)
aggagaaagcuuaccaugggccagaucgugaccuucuuccaggaggucccccacgugaucgaggaggugaugaacaucguccugaucgcccucagcauccuggccgugcugaaggggcucuacaacuucgcgaccugcggccugguggggcuggucacguuccuccugcugugcggccgcuccugcaccaucagccucuacaaggggguguacgagcugcagacccuggagcucaacauggagacccugaacaugacgaugccgcuguccugcaccaagaacaacagccaccacuacaucauggugggcaacgagaccggccucgagcugacccugacgaacaccuccaucaucaaccacaaguucugcaaccucagcgacgcccacaagaagaaccuguacgaccacgcccugauguccaucaucagcaccuuccaccucuccauccccaacuucaaccaguacgaggccaugagcugcgacuucaacgggggcaagaucuccguccaguacaaccugagccacuccuacgccggggacgcggccaaccacugcggcaccguggccaacggggugcugcagacguucaugcggauggccuggggcggcagcuacaucgcgcucgacuccgggcgcgaccggugggacugcaucaugaccagcuaccaguaccugaucauccagaacaccaccugggaggaccacugccaguucucccgccccagccccaucggcuaccuggggcuccugucccagcggacgcgcgacaucuacaucagccggcgccugcucggcaccuucaccuggacccugagcgacuccgagggcaaggacacgcccgggggcuacugccugacccgguggaugcucaucgaggccgagcugaagugcuucgggaacaccgccgucgccaagugcaacgagaagcacgacgaggaguucugcgacaugcugcgccucuucgacuucaacaagcaggccauccagcggcugaaggcggaggcccagaugagcauccagcugaucaacaaggccgugaacgcccucaucaacgaccagcugaucaugaagaaccaccuccgcgacaucaugggcauccccuacugcaacuacuccaaguacugguaccugaaccacaccacgaccgggaagaccagccugcccaagugcuggcugguguccaacggcagcuaccucaacgagacccacuucuccgacgacaucgagcagcaggccgacaacaugaucacggagaugcugcagaaggaguacauggagcggcagggcaagaccccgcuggggcucgucgaccuguucguguucagcaccuccuucuaccugaucagcaucuuccugcaccucgugaagaucccgugaggacuaguuauaagacugacuagcccgaugggccucccaacgggcccuccuccccuccuugcaccgagauuaaucaaaggcucuuuucagagccaccaaaaaaaaaaaaaaaaaaaaaaaaaaaaaaaaaaaaaaaaaaaaaaaaaaaaaaaaaaaaaaaaagaauu

SEQ ID NO: 42949 - RNA, 1544 nt, Artificial Sequence
  mRNA product Design i-3 (hSL-A64-N5) comprising derived and/or modified sequence from LASV(Josiah;Clade IV)__NP_694870__GPCmut13 (opt1)
aggagaaagcuuaccaugggccagaucgugaccuucuuccaggaggucccccacgugaucgaggaggugaugaacaucguccugaucgcccucagcgugcuggccgugcugaaggggcucuacaacuucgcgaccugcggccuggucgggcuggugacguuccuccugcugugcggccgcuccugcaccaccagccucuacaaggggguguacgagcugcagacccuggagcucaacauggagacgcugaacaugaccaugccgcuguccugcaccaagaacaacagccaccacuacaucauggucggcaacgagaccggccucgagcugacgcugaccaacaccuccaucaucaaccacaaguucugcaaccucagcgacgcccacaagaagaaccuguacgaccacgcccugauguccaucaucagcaccuuccaccucuccauccccaacuucaaccaguacgaggccaugagcugcgacuucaacgggggcaagaucuccgugcaguacaaccugagccacuccuacgccggggacgcggccaaccacugcggcacgguggccaacgggguccugcagaccuucaugcggauggccuggggcggcagcuacaucgcgcucgacuccgggcgcggcaacugggacugcaucaugaccagcuaccaguaccugaucauccagaacaccacgugggaggaccacugccaguucucccggcccagccccaucggguaccugggccuccugucccagcgcacccgggacaucuacaucagccgccggcugcucggcaccuucaccuggacgcugagcgacuccgaggggaaggacaccccgggcggguacugccugacccgcuggaugcucaucgaggccgagcugaagugcuucggcaacaccgccguggccaagugcaacgagaagcacgacgaggaguucugcgacaugcugcggcuguucgacuucaacaagcaggccauccagcgccugaaggcggaggcccagaugagcauccagcugaucaacaaggccgugaacgcccucaucaacgaccagcugaucaugaagaaccaccuccgggacaucauggggauccccuacugcaacuacuccaaguacugguaccucaaccacacgaccaccggccgcaccagccugcccaagugcuggcuggucuccaacggcagcuaccucaacgagacgcacuucuccgacgacaucgagcagcaggccgacaacaugaucaccgagaugcugcagaaggaguacauggagcggcaggggaagacgccccugggccugguggaccucuucguguucagcaccuccuucuaccugaucagcaucuuccugcaccucgucaagaucccgugaggacuaguuauaagacugacuagcccgaugggccucccaacgggcccuccuccccuccuugcaccgagauuaaucaaaggcucuuuucagagccaccaaaaaaaaaaaaaaaaaaaaaaaaaaaaaaaaaaaaaaaaaaaaaaaaaaaaaaaaaaaaaaaaagaauu

SEQ ID NO: 42950 - RNA, 1541 nt, Artificial Sequence
  mRNA product Design i-3 (hSL-A64-N5) comprising derived and/or modified sequence from LASV(LP;Clade I)__AAF86701__GPCmut13 (opt1)
aggagaaagcuuaccaugggccagaucaucaccuucuuccaggaggugccccacgucaucgaggaggugaugaacaucgugcugaucgcccucagccugcuggccauccucaaggggcuguacaacaucgcgaccugcggcaucaucgggcuggucgccuuccucuuccugugcggcaaguccugcagccugacgcucaagggcggguacgagcugcagacccuggagcucaacauggagacccugaacaugaccaugccgcuguccugcacgaagaacagcucccaccacuacauccgcgugggcaacgagaccgggcucgagcugacccugaccaacacgagcaucaucaaccacaaguucugcaaccucuccgacgcccacaagaagaaccuguacgaccacgcccugaugagcaucaucuccaccuuccaccucagcauccccaacuucaaccaguacgaggccauguccugcgacuucaacggcgggaagaucagcgugcaguacaaccugucccacagcuacgcgggcgacgccgccgagcacugcgggaccgucgccaacggcgugcugcagaccuucaugcggauggcguggggcgggcgcuacaucgcccucgacuccggcaaggggaacugggacugcaucaugacgagcuaccaguaccugaucauccagaacaccaccugggaggaccacugccaguucucccggcccagccccaucggcuaccugggccuccugucccagcgcacccgggacaucuacaucagccgccggcugcucgggacguucaccuggacccugagcgacuccgagggcaacgagacccccgggggcuacugccugacgcgcuggaugcucaucgaggccgagcugaagugcuucgggaacaccgccguggccaagugcaacgagaagcacgacgaggaguucugcgacaugcugcggcuguucgacuucaacaagcaggcgauccgccggcugaaggccgaggcccagaugagcauccagcugaucaacaaggccgucaacgcccucaucaacgaccagcugaucaugaagaaccaccuccgcgacaucaugggcauccccuacugcaacuacuccaaguacugguaccucaaccacaccagcuccggccggaccagccugcccaagugcuggcugaucuccaacgggagcuaccucaacgagacgcaguucuccgacgacaucgagcagcaggcggacaacaugaucaccgagaugcugcagaaggaguacaucgagcgccagggcaagaccccgcuggggcugguggacaucuucaucuucagcaccuccuucuaccucaucagcaucuuccugcaccugaucaagaucccgugaggacuaguuauaagacugacuagcccgaugggccucccaacgggcccuccuccccuccuugcaccgagauuaaucaaaggcucuuuucagagccaccaaaaaaaaaaaaaaaaaaaaaaaaaaaaaaaaaaaaaaaaaaaaaaaaaaaaaaaaaaaaaaaaagaauu

SEQ ID NO: 42951 - RNA, 1541 nt, Artificial Sequence
  mRNA product Design i-3 (hSL-A64-N5) comprising derived and/or modified sequence from LASV(803213;Clade II)__AAF86703__GPCmut13 (opt1)
aggagaaagcuuaccaugggccagaucaucaccuucuuccaggaggugccccacgucaucgaggaggugaugaacaucgugcugaucgcccucagccugcuggccauccucaaggggaucuacaacgucgcgaccugcggccuguucgggcugaucuccuuccuccugcugugcggccgcagcugcuccgugacguacaaggggguguacgagcuccagacccuggagcugaacauggccaaccucaacaugaccaugccgcugagcugcaccaagaacaacucccaccacuacaucauggucggcaacgagacgggccuggagcucacccugaccaacaccagcaucaucaaccacaaguucugcaaccuguccgacgcccacaagaagaaccucuacgaccacgcccugaugagcaucaucuccacguuccaccugagcauccccaacuucaaccaguacgaggccauguccugcgacuucaacgggggcaagaucagcgugcaguacaaccucucccacagcuucgcgguggacgccgccaaccacugcgggaccaucgccaacggcguccugcagaccuucaugcggauggcguggggcggguccuacaucgcccuggacagcggcaaggggaacugggacugcaucaugaccuccuaccaguaccucaucauccagaacacgaccugggaggaccacugccaguucagccgccccucccccaucggcuaccuggggcugcucagccagcggacccgcgacaucuacaucagccggcgccugcugggcaccuucacguggacccucuccgacagcgagggcaacgaggcccccgggggcuacugccugacccgguggaugcugaucgaggccgagcucaagugcuucgggaacaccgccguggcgaagugcaacgagaagcacgacgaggaguucugcgacaugcugcgccuguucgacuucaacaagcaggccaucaagcggcucaagacggaggcccagauguccauccagcugaucaacaaggccgugaacgcccugaucaacgaccagcucaucaugaagaaccaccuccgcgacaucaugggcauccccuacugcaacuacagccgguacugguaccugaaccacaccgucaccgggaagaccucccugccccgcugcuggcuggugagcaacggcuccuaccugaacgagacgcacuucagcgacgacaucgagcagcaggcggacaacaugaucaccgagaugcuccagaaggaguacauggaccggcagggcaagaccccgcuggggcugguggaccuguucgucuucuccaccagcuucuaccucaucuccaucuuccugcaccuggugaagaucccgugaggacuaguuauaagacugacuagcccgaugggccucccaacgggcccuccuccccuccuugcaccgagauuaaucaaaggcucuuuucagagccaccaaaaaaaaaaaaaaaaaaaaaaaaaaaaaaaaaaaaaaaaaaaaaaaaaaaaaaaaaaaaaaaaagaauu

SEQ ID NO: 42952 - RNA, 1541 nt, Artificial Sequence
  mRNA product Design i-3 (hSL-A64-N5) comprising derived and/or modified sequence from LASV(GA391;Clade III)__CAA36645__GPCmut13 (opt1)
aggagaaagcuuaccaugggccagaucgugaccuucuuccaggaggucccccacgugaucgaggaggugaugaacaucguccugaucgcccucagcauccuggccauccugaaggggcucuacaacguggcgaccugcggccugaucgggcuggugacguuccuccugcuguccggccgcagcugcucccucaucuacaaggggaccuacgagcugcagacccuggagcucaacauggagacccugaacaugacgaugccgcugagcugcaccaagaacaacucccaccacuacauccgggucggcaacgagaccggccucgagcugacccugacgaacaccagcauccucaaccacaaguucugcaaccuguccgacgcccacaagcgcaaccuguacgaccacagccucauguccaucaucagcaccuuccaccuguccauccccaacuucaaccaguacgaggccaugagcugcgacuucaacgggggcaagaucaccgugcaguacaaccugucccacagcuucgccguggacgccgcggggcacugcggcacgcucgccaacgggguccugcagaccuucaugcggauggccuggggcggcuccuacaucgcccuggacagcgggcgcggcaacugggacugcaucaugaccuccuaccaguaccucaucauccagaacaccacgugggacgaccacugccaguucagccggcccucccccaucggguaccugggccugcucagccagcgcacccgggacaucuacaucagccgccggcugcugggcaccuucaccuggacgcucuccgacagcgaggggaacgagaccccgggcggguacugccugacccgcuggaugcugaucgaggcggagcucaagugcuucggcaacaccgccguggccaagugcaacgagaagcacgacgaggaguucugcgacaugcugcggcuguucgacuucaacaagcaggccauccgccggcucaagacggaggcccagauguccauccagcugaucaacaaggcggugaacgcccugaucaacgaccagcucaucaugaagaaccaccuccgcgacaucauggggauccccuacugcaacuacagccgguacugguaccugaaccacaccuccaccggcaagaccagccugccccgcugcuggcugaucuccaacggcagcuaccugaacgagacgaaguucuccgacgacaucgagcagcaggccgacaacaugaucaccgagaugcugcagaaggaguacaucgaccggcaggggaagacgccccucggccuggucgaccuguucguguucagcaccuccuucuaccucaucagcaucuuccugcaccuggugaagaucccgugaggacuaguuauaagacugacuagcccgaugggccucccaacgggcccuccuccccuccuugcaccgagauuaaucaaaggcucuuuucagagccaccaaaaaaaaaaaaaaaaaaaaaaaaaaaaaaaaaaaaaaaaaaaaaaaaaaaaaaaaaaaaaaaaagaauu

SEQ ID NO: 42953 - RNA, 1544 nt, Artificial Sequence
  mRNA product Design i-3 (hSL-A64-N5) comprising derived and/or modified sequence from LASV(AV;Clade V)__CCA30314__GPCmut13 (opt1)
aggagaaagcuuaccaugggccagaucgugaccuucuuccaggaggucccccacgugaucgaggaggugaugaacaucguccugaucgcccucagcauccuggccgugcugaaggggcucuacaacaucgcgaccugcggccugaucgggcugaucacguuccuccugcugugcggccgcuccugcagcuccaaccucuacaaggggguguacgagcugcagagccuggaccucaacauggagacccugaacaugaccaugccgcuguccugcaccaagaacaacagccaccacuacauccgggucggcaacgacacgggccucgagcugacccugaccaacaccuccauccucaaccacaaguucugcaaccugagcgacgcccacaagaaggaccuguacgaccacgcccucauguccaucaucagcacguuccaccuguccauccccaacuucaaccaguacgaggccaugagcugcgacuucaacgggggcaagaucuccgugcaguacaaccugagccacuccuacgccaucgacgcggccaaccacugcgggaccguggccaacggcauccuccagaccuucaugcgcauggccuggggcgggagcuacaucgcgcuggacuccggccgggggaacugggacugcaucaugaccagcuaccaguaccugaucauccagaacacgaccugggagaaccacugccaguucucccgccccagccccaucggcuaccucgggcugcugagccagcggacccgcgacaucuacaucucccggcgccuccugggcaccuucacguggacccugagcgacuccgagggcaacgccacccccgggggcuacugccucacccgguggaugcugaucgaggccgagcugaagugcuucgggaacacggccgucgccaagugcaacgagaagcacgacgaggaguucugcgacaugcuccgccuguucgacuucaacaagcaggcgaucagccggcugaaguccgaggcccagaugagcauccagcucaucaacaaggccgugaacgcccugaucaacgaccagcugaucaugaagaaccaccuccgcgacaucaugggcauccccuacugcaacuacuccaaguacugguaccugaaccacaccaucaccgggaagaccagccugcccaagugcuggcucguguccaacggcagcuaccugaacgagacgcacuucuccgacgacaucgagcagcaggccgacaacaugaucaccgagaugcugcagaaggaguacauggagcggcagggcaagaccccgcuggggcucgucgaccuguucguguucagcaccuccuucuaccugaucagcaucuuccuccgccuggugaagaucccgugaggacuaguuauaagacugacuagcccgaugggccucccaacgggcccuccuccccuccuugcaccgagauuaaucaaaggcucuuuucagagccaccaaaaaaaaaaaaaaaaaaaaaaaaaaaaaaaaaaaaaaaaaaaaaaaaaaaaaaaaaaaaaaaaagaauu

SEQ ID NO: 42954 - RNA, 1541 nt, Artificial Sequence
  mRNA product Design i-3 (hSL-A64-N5) comprising derived and/or modified sequence from LASV(Togo/2016/7082;Clade VI)__AMR44577__GPCmut13 (opt1)
aggagaaagcuuaccaugggccagaucaucaccuucuuccaggaggugccccacgucaucgaggaggugaugaacaucgugcugaucgcccucagccugcuggccauccucaagggggucuacaacguggcgaccugcggcaucaucgggcuggugacguuccuguuccucugcggccgcuccugcagccugaucuacaagggguccuacgagcugcagacccucgagcugaacauggagacccugaacaugaccaugccgcucagcugcacgaagaacuccagccaccacuacauccgggucggcaacgagaccggccuggagcugacccucaccaacacguccaucaucaaccacaaguucugcaaccugagcgacgcccacaagcgcaaccuguacgaccacgcccucauguccauccugagcaccuuccaccuguccauccccaacuucaaccaguacgaggccaugagcugcgacuucaacgggggcaagaucuccgugcaguacaaccucagccacgccuacgcgguggacgccgccgagcacugcgggaccgucgccaacggcgugcugcagaccuucaugcggauggcguggggcggguccuacaucgcccuggacagcggccgcgggaacugggacugcaucaugacguccuaccaguaccucaucauccagaacaccaccugggaggaccacugccaguucagccggcccucccccaucggcuaccuggggcugcucagccagcgcacccgggacaucuacaucagccgccggcugcugggcacguucaccuggacccucuccgacagcgagggcaacgagacccccgggggcuacugccugacgcgcuggaugcugaucgaggccgagcucaagugcuucgggaacaccgccguggccaagugcaacgagaagcacgacgaggaguucugcgacaugcugcggcuguucgacuucaacaagcaggcgauccagcgccucaaguccgaggcccagaugagcauccagcugaucaacaaggccgucaacgcccugaucaacgaccagcucaucaugaagaaccaccuccgggacaugaugggcauccccuacugcaacuacuccaaguacugguaccugaaccacaccagcuccgggcgcaccagccugcccaagugcuggcugguguccaacggcagcuaccugaacgagacgcacuucuccgacgacaucgagcagcaggccgacaacaugaucaccgagaugcuccagaaggaguacaucgaccggcagggcaagaccccgcuggggcugguggaccuguucgucuucagcaccuccuucuaccucaucagcaucuuccugcaccugaucaagaucccgugaggacuaguuauaagacugacuagcccgaugggccucccaacgggcccuccuccccuccuugcaccgagauuaaucaaaggcucuuuucagagccaccaaaaaaaaaaaaaaaaaaaaaaaaaaaaaaaaaaaaaaaaaaaaaaaaaaaaaaaaaaaaaaaaagaauu

SEQ ID NO: 42955 - RNA, 1541 nt, Artificial Sequence
  mRNA product Design i-3 (hSL-A64-N5) comprising derived and/or modified sequence from LASV(KAK-428;Clade n.d. (VII))__ANH09740__GPCmut13 (opt1)
aggagaaagcuuaccaugggccagaucgugaccuucuuccaggaggucccccacgugaucgaggaggugaugaacaucguccugaucgcccucagccugcuggccauccucaaggggcuguacaacuucgcgaccugcggcgugaucgggcugaucacguuccuccugcugugcggccgcuccugcagcgccaccuacaaggggcaguacgagcuccagacccuggagcugaacauggagucccucaacaugaccaugccgcugagcugcacgaagaacaacucccaccacuacauccgggccggcaacaacaccggccuggagcucacccugaccaacacgagcaucaucucccacaaguucugcaaccugagcgacgcccacaagaagaaccucuacgaccacacccugauguccaucaucaccaccuuccaccugagcauccccaacuucaaccaguacgaggccauguccugcgacuucaacgggggcaagaucagcauccaguacaaccucucccacagcuacgcgggggacgccgcccagcacugcggcacgguggccaacgggguccugcagaccuucaugcgcauggcguggggcggcuccuaccuggcccucgacagcgggcggcgcggcugggacugcaucaucuccagcuaccaguaccugaucauccagaacaccaccugggacgaccacugccaguucucccggcccagccccaucggguaccugggcuucgugagccagaagacgcgcgacaucuacaucucccggcgccuccugggcaccuucaccuggacccugagcgacuccgaggggcacgacaugccgggcggguacugccucacgcgguggaugcugaucgaggccgaccugaagugcuucggcaacaccgccguggccaagugcaacgagaagcacgacgaggaguucugcgacauguggcgccucuucgacuucaacaagcaggcgauccagcggcugaaggccgaggcccagaugaacauccagcugaucaacaaggccgucaacgcccucaucaacgaccagcugaugaugaagaaccaccuccgcgacaucauggggauccccuacugcaacuacagcaaguucugguaccugaacaacaccaccacgggccggaccucccugccccgcugcuggcugaucagcaacggcuccuaccucaacgagacccacuucagcgacgacaucgagcagcaggcggacaacaugaucaccgagaugcugcagaaggaguacauggaccggcaggggaagacgccccugggccucguggaccuguucguguucuccaccagcuucuaccugaucaccaucuuccugcaccucgucaagaucccgugaggacuaguuauaagacugacuagcccgaugggccucccaacgggcccuccuccccuccuugcaccgagauuaaucaaaggcucuuuucagagccaccaaaaaaaaaaaaaaaaaaaaaaaaaaaaaaaaaaaaaaaaaaaaaaaaaaaaaaaaaaaaaaaaagaauu

SEQ ID NO: 42956 - RNA, 1541 nt, Artificial Sequence; identical to SEQ ID NO: 42950
  mRNA product Design i-3 (hSL-A64-N5) comprising derived and/or modified sequence from LASV(Pinneo-NIG-1969;Clade I)__AIT17836__GPCmut13 (opt1)

SEQ ID NO: 42957 - RNA, 1541 nt, Artificial Sequence
  mRNA product Design i-3 (hSL-A64-N5) comprising derived and/or modified sequence from LASV(ISTH0009-NIG-2011;Clade II)__AIT17404__GPCmut13 (opt1)
aggagaaagcuuaccaugggccagaucaucaccuucuuccaggaggugccccacgucaucgaggaggugaugaacaucgugcugaucgcccucagccugcuggccauccucaaggggaucuacaacgucgcgaccugcggccuguucgggcugguguccuuccuccugcugugcggccgcagcugcuccacgaccuacaaggggguguacgagcuccagacccuggagcuggacauggccagccucaacaugaccaugccgcuguccugcacgaagaacaacagccaccacuacaucauggucggcaacgagaccggccuggagcucacccugaccaacacguccaucaucaaccacaaguucugcaaccugagcgacgcccacaagaagaaccucuacgaccacgcccugauguccaucaucagcaccuuccaccuguccauccccaacuucaaccaguacgaggccaugagcugcgacuucaacgggggcaagaucuccgugcaguacaaccucagccacgcguacgccguggacgccgccaaccacugcgggaccaucgcgaacggcguccugcagaccuucaugcggauggccuggggcggguccuacaucgcccuggacagcggcaagggguccugggacugcaucaugacgagcuaccaguaccucaucauccagaacaccaccugggaggaccacugccaguucucccgccccagccccaucggcuaccuggggcugcucagccagcggacccgcgacaucuacaucucccggcgccugcugggcacguucaccuggacccucagcgacuccgagggcaacgagacccccgggggcuacugccugacgcgguggaugcugaucgaggccgagcucaagugcuucgggaacaccgccguggcgaagugcaacgagaagcacgacgaggaguucugcgacaugcugcgccuguucgacuucaacaagcaggccauccggcgccucaagaccgaggcccagaugagcauccagcugaucaacaaggccgugaacgcccugaucaacgaccagcucaucaugaagaaccaccuccgggacaucaugggcaucccguacugcaacuacuccaaguacugguaccugaaccacaccgucacggggaagaccagccugccccgcugcuggcugguguccaacggcagcuaccugaacgagacccacuucuccgacgacaucgagcagcaggcggacaacaugaucaccgagcuccugcagaaggaguacauggaccggcagggcaagacgccccuggggcugguggaccucuucgucuucagcaccuccuucuaccugaucagcaucuuccugcaccucaucaagaucccgugaggacuaguuauaagacugacuagcccgaugggccucccaacgggcccuccuccccuccuugcaccgagauuaaucaaaggcucuuuucagagccaccaaaaaaaaaaaaaaaaaaaaaaaaaaaaaaaaaaaaaaaaaaaaaaaaaaaaaaaaaaaaaaaaagaauu

SEQ ID NO: 42958 - RNA, 1541 nt, Artificial Sequence
  mRNA product Design i-3 (hSL-A64-N5) comprising derived and/or modified sequence from LASV(ISTH2010-NIG-2012;Clade II)__AIT17482__GPCmut13 (opt1)
aggagaaagcuuaccaugggccagaucaucaccuucuuccaggaggugccccacgucaucgaggaggugaugaacaucgugcugaucgcccucagccugcuggccauccucaaggggaucuacaacgucgcgaccugcggccuguucgggcugguguccuuccuccugcugugcggccgcagcugcuccacgaccuacaaggggguguacgagcuccagacccuggagcuggacauggccagccucaacaugaccaugccgcuguccugcacgaagaacaacagccaccacuacaucauggucggcaacgagaccggccuggagcucacccugaccaacacguccaucaucaaccacaaguucugcaaccugagcgacgcccacaagaagaaccucuacgaccacgcccugauguccaucaucagcaccuuccaccuguccauccccaacuucaaccaguacgaggccaugagcugcgacuucaacgggggcaagaucuccgugcaguacaaccucagccacgcguacgccguggacgccgccaaccacugcgggaccaucgcgaacggcguccugcagaccuucaugcggauggccuggggcggguccuacaucgcccuggacagcggcaagggguccugggacugcaucaugacgagcuaccaguaccucaucauccagaacaucaccugggaggaccacugccaguucucccgccccagccccaucggcuaccuggggcugcucagccagcggacccgcgacaucuacaucucccggcgccugcugggcaccuucacguggacccucagcgacuccgagggcaacgagacccccgggggcuacugccugacccgguggaugcugaucgaggccgagcucaagugcuucgggaacacggccguggcgaagugcaacgagaagcacgacgaggaguucugcgacaugcugcgccuguucgacuucaacaagcaggccauccggcgccucaagaccgaggcccagaugagcauccagcugaucaacaaggccgugaacgcccugaucaacgaccagcucaucaugaagaaccaccuccgggacaucaugggcauccccuacugcaacuacuccaaguacugguaccugaaccacaccgucaccgggaagacgagccugccccgcugcuggcugguguccaacggcagcuaccugaacgagacccacuucuccgacgacaucgagcagcaggcggacaacaugaucaccgagcuccugcagaaggaguacaucgaccggcagggcaagaccccgcuggggcugguggaccucuucgucuucagcacguccuucuaccugaucagcaucuuccugcaccucgugaagaucccgugaggacuaguuauaagacugacuagcccgaugggccucccaacgggcccuccuccccuccuugcaccgagauuaaucaaaggcucuuuucagagccaccaaaaaaaaaaaaaaaaaaaaaaaaaaaaaaaaaaaaaaaaaaaaaaaaaaaaaaaaaaaaaaaaagaauu

SEQ ID NO: 42959 - RNA, 1541 nt, Artificial Sequence
  mRNA product Design i-3 (hSL-A64-N5) comprising derived and/or modified sequence from LASV(Lassa virus/H.sapiens-wt/NGA/2015/ISTH_0543;Clade II)__AVO03639__GPCmut13 (opt1)
aggagaaagcuuaccaugggccagaucaucaccuucuuccaggaggugccccacgucaucgaggaggugaugaacaucgugcugaucgcccucagccugcuggccauccucaaggggaucuacaacgucgcgaccugcggccuguucgggcugguguccuuccuccugcugugcggccgcagcugcuccacgaccuacaaggggguguacgagcuccagacccuggagcuggacauggccaaccucaacaugaccaugccgcugagcugcacgaagaacaacucccaccacuacaucauggucggcaacgagaccggccuggagcucacccugaccaacacgagcaucaucaaccacaaguucugcaaccuguccgacgcccacaagaagaaccucuacgaccacgcccugaugagcaucaucuccaccuuccaccugagcauccccaacuucaaccaguacgaggccauguccugcgacuucaacgggggcaagaucagcgugcaguacaaccucucccacaccuacgcgguggacgccgccaaccacugcgggaccaucgccaacggcguccugcagacguucaugcggauggcguggggcgggagcuacaucgcccuggacuccggcaaggggagcugggacugcaucaugaccuccuaccaguaccucgugauccagaacaccaccugggaggaccacugccaguucagccgccccucccccaucggcuaccuggggcugcucagccagcggacgcgcgacaucuacaucagccggcgccugcugggcaccuucaccuggacccucuccgacagcgagggcaacgagacgcccgggggcuacugccugacccgguggaugcugaucgaggccgagcucaagugcuucgggaacaccgccguggccaagugcaacgagaagcacgacgaggaguucugcgacaugcugcgccuguucgacuucaacaagcaggcgauccggcgccucaagaccgaggcccagauguccauccagcugaucaacaaggccgucaacgcccugaucaacgaccagcucaucaugaagaaccaccuccgggacaucaugggcauccccuacugcaacuacagcaaguacugguaccugaaccacacggugaccgggaagaccucccugccccgcugcuggcuggugagcaacggcuccuaccugaacgagacccacuucagcgacgacaucgagcagcaggccgacaacaugaucacggagcuccugcagaaggaguacaucgaccggcagggcaagaccccgcuggggcuggucgaccucuucguguucuccaccagcuucuaccugaucuccaucuuccugcaccucgugaagaucccgugaggacuaguuauaagacugacuagcccgaugggccucccaacgggcccuccuccccuccuugcaccgagauuaaucaaaggcucuuuucagagccaccaaaaaaaaaaaaaaaaaaaaaaaaaaaaaaaaaaaaaaaaaaaaaaaaaaaaaaaaaaaaaaaaagaauu

SEQ ID NO: 42960 - RNA, 1541 nt, Artificial Sequence
  mRNA product Design i-3 (hSL-A64-N5) comprising derived and/or modified sequence from LASV(Lassa virus/H.sapiens-wt/NGA/2016/ISTH_0009;Clade II)__AVO03571__GPCmut13 (opt1)
aggagaaagcuuaccaugggccagaucaucaccuucuuccaggaggugccccacgucaucgaggaggugaugaacaucgugcugaucgcccucagccugcuggccauccucaaggggaucuacaacgucgcgaccugcggccugcuggggcucguguccuuccugcugcucugcggccgcagcugcuccacgaccuacaaggggguguacgagcugcagacccuggagcucgacauggccagccugaacaugaccaugccgcuguccugcacgaagaacaacagccaccacuacaucauggucggcaacgagaccggccucgagcugacccugaccaacacguccaucaucaaccacaaguucugcaaccucagcgacgcccacaagaagaaccuguacgaccacgcccugauguccaucaucagcaccuuccaccucuccauccccaacuucaaccaguacgaggccaugagcugcgacuucaacgggggccggaucuccgugcaguacaaccugagccacuccuacgcgguggacgccgccaaccacugcgggaccaucgccaacggcguccugcagaccuucaugcgcauggcguggggcgggagcuacaucgcccucgacuccggcaaggggagcugggacugcaucaugacguccuaccaguaccugaucauccagaacaccaccugggaggaccacugccaguucagccggcccagccccaucggcuaccuggggcuccugucccagcgcacccgggacaucuacaucagccgccggcugcucggcacguucaccuggacccuguccgacagcgagggcaacgagacccccgggggcuacugccugacgcgcuggaugcucaucgaggccgagcugaagugcuucgggaacaccgccguggccaagugcaacgagaagcacgacgaggaguucugcgacaugcugcggcuguucgacuucaacaagcaggcgauccgccggcugaagaccgaggcccagauguccauccagcugaucaacaaggccgugaacgcccucaucaacgaccagcugaucaugaagaaccaccuccgcgacaucaugggcaucccguacugcaacuacagcaaguacugguaccucaaccacaccgucacggggaagaccucccugccccggugcuggcuggugagcaacggcuccuaccucaacgagacccacuucagcgacgacaucgagcagcaggccgacaacaugaucaccgagcugcugcagaaggaguacaucgaccgccagggcaagacgccccuggggcucguggaccuguucgucuucuccaccagcuucuaccugaucuccaucuuccuccaccuggugaagaucccgugaggacuaguuauaagacugacuagcccgaugggccucccaacgggcccuccuccccuccuugcaccgagauuaaucaaaggcucuuuucagagccaccaaaaaaaaaaaaaaaaaaaaaaaaaaaaaaaaaaaaaaaaaaaaaaaaaaaaaaaaaaaaaaaaagaauu

SEQ ID NO: 42961 - RNA, 1541 nt, Artificial Sequence
  mRNA product Design i-3 (hSL-A64-N5) comprising derived and/or modified sequence from LASV(Lassa virus/H.sapiens-wt/NGA/2016/ISTH_0017;Clade II)__AVO03567__GPCmut13 (opt1)
aggagaaagcuuaccaugggccagaucaucaccuucuuccaggaggugccccacgucaucgaggaggugaugaacaucgugcugaucgcccucagccugcuggccauccucaaggggaucuacaacgucgcgaccugcggccuguucgggcugguguccuuccuccugcugugcggccgcagcugcuccacgaccuacaaggggguguacgagcuccagacccuggagcuggacauggccagccucaacaugaccaugccgcuguccugcacgaagaacaacagccaccacuacaucauggucggcaacgagaccggccuggagcucacccugaccaacacguccaucaucaaccacaaguucugcaaccugagcgacgcccacaagaagaaccucuacgaccacgcccugauguccaucaucagcaccuuccaccuguccauccccaacuucaaccaguacgaggccaugagcugcgacuucaacgggggcaagaucuccgugcaguacaaccucagccacaccuacgcgaucgacgccgccaaccacugcgggaccaucgccaacggcgugcugcagacguucaugcggauggcguggggcggguccuacaucgcccuggacagcggcaagggguccugggacugcaucaugaccagcuaccaguaccucaucauccagaacaccaccugggaggaccacugccaguucucccgccccagccccaucggcuaccuggggcugcucagccagcggacgcgcgacaucuacaucucccggcgccugcugggcaccuucaccuggacccucagcgacuccgagggcaacgagacgcccgggggcuacugccugacccgguggaugcugaucgaggccgagcucaagugcuucgggaacaccgccgucgccaagugcaacgagaagcacgacgaggaguucugcgacaugcugcgccuguucgacuucaacaagcaggcgauccggcgccucaagaccgaggcccagaugagcauccagcugaucaacaaggccgugaacgcccugaucaacgaccagcucaucaugaagaaccaccuccgggacaucaugggcauccccuacugcaacuacuccaaguacugguaccugaaccacacggugaccgggaagaccagccugccccgcugcuggcuggucuccaacggcagcuaccugaacgagacccacuucuccgacgacaucgagcagcaggccgacaacaugaucacggagcuccugcagaaggaguacauggaccggcagggcaagaccccgcuggggcugguggaccucuucguguucagcaccuccuucuaccugaucagcaucuuccugcaccucguccgcaucccgugaggacuaguuauaagacugacuagcccgaugggccucccaacgggcccuccuccccuccuugcaccgagauuaaucaaaggcucuuuucagagccaccaaaaaaaaaaaaaaaaaaaaaaaaaaaaaaaaaaaaaaaaaaaaaaaaaaaaaaaaaaaaaaaaagaauu

SEQ ID NO: 42962 - RNA, 1541 nt, Artificial Sequence
  mRNA product Design i-3 (hSL-A64-N5) comprising derived and/or modified sequence from LASV(Lassa virus/H.sapiens-wt/NGA/2018/ISTH_0959;Clade II)__AVV65099__GPCmut13 (opt1)
aggagaaagcuuaccaugggccagaucaucaccuucuuccaggaggugccccacgucaucgaggaggugaugaacaucgugcugaucgcccucagccugcuggccauccucaaggggaucuacaacgucgugaccugcggccuguucgggcugguguccuuccuccugcugugcggccgcagcugcuccacgaccuacaagggggucuacgagcuccagacccuggagcuggacauggcgagccucaacaugaccaugccgcuguccugcacgaagaacaacagccaccacuacaucauggugggcaacgagaccggccuggagcucacccugaccaacacguccaucaucaaccacaaguucugcaaccugagcgacgcccacaagaagaaccucuacgaccacgcccugauguccaucaucagcaccuuccaccuguccauccccaacuucaaccaguacgaggccaugagcugcgacuucaacgggggcaagaucuccgugcaguacaaccucagccacgccuacgcgaucgacgccgccaaccacugcgggaccaucgccaacggcguccugcagaccuucaugcggauggcguggggcggguccuacaucgcccuggacagcggcaagggguccugggacugcaucaugacgagcuaccaguaccucaucauccagaacaccaccugggaggaccacugccaguucucccgccccagccccaucggcuaccuggggcugcucagccagcggacccgcgacaucuacaucucccggcgccugcugggcacguucaccuggacccucagcgacuccgagggcaacgagacccccgggggcuacugccugacgcgguggaugcugaucgaggccgagcucaagugcuucgggaacaccgccguggccaagugcaacgagaagcacgacgaggaguucugcgacaugcugcgccuguucgacuucaacaagcaggcgauccggcgccucaagaccgaggcccagaugagcauccagcugaucaacaaggccgugaacgcccugaucaacgaccagcucaucaugaagaaccaccuccgggacaucaugggcaucccguacugcaacuacuccaaguacugguaccugaaccacaccgucacggggaagaccagccugccccgcugcuggcugguguccaacggcagcuaccugaacgagacccacuucuccgacgacaucgagcagcaggccgacaacaugaucaccgagcuccugcagaaggaguacaucgaccggcagggcaagacgccccuggggcugguggaccucuucgucuucagcaccuccuucuaccugaucagcaucuuccugcaccucgugaagaucccgugaggacuaguuauaagacugacuagcccgaugggccucccaacgggcccuccuccccuccuugcaccgagauuaaucaaaggcucuuuucagagccaccaaaaaaaaaaaaaaaaaaaaaaaaaaaaaaaaaaaaaaaaaaaaaaaaaaaaaaaaaaaaaaaaagaauu

SEQ ID NO: 42963 - RNA, 1541 nt, Artificial Sequence
  mRNA product Design i-3 (hSL-A64-N5) comprising derived and/or modified sequence from LASV(LASV003-NIG-2008;Clade II)__AIT17580__GPCmut13 (opt1)
aggagaaagcuuaccaugggccagaucaucaccuucuuccaggaggugccccacgucaucgaggaggugaugaacaucgugcugaucgcccucagccugcuggccauccucaaggggaucuacaacgucgcgaccugcggccuguucgggcugguguccuuccuccugcugugcggccgcagcugcuccacgaccuacaaggggguguacgagcuccagacccuggagcuggacauggccagccucaacaugaccaugccgcuguccugcacgaagaacaacagccaccacuacaucauggucggcaacgagaccggccuggagcucacccugaccaacacguccaucaucaaccacaaguucugcaaccugagcgacgcccacaagaagaaccucuacgaccacgcccugauguccaucaucagcaccuuccaccuguccauccccaacuucaaccaguacgaggccaugagcugcgacuucaacgggggcaagaucuccgugcaguacaaccucagccacaccuacgcgguggacgccgccaaccacugcgggaccaucgccaacggcguccugcagacguucaugcggauggcguggggcggguccuacaucgcccuggacagcggcaagggguccugggacugcaucaugaccagcuaccaguaccucaucauccagaacaccaccugggaggaccacugccaguucucccgccccagccccaucggcuaccuggggcugcucagccagcggacgcgcgacaucuacaucucccggcgccugcugggcaccuucaccuggacccucagcgacuccgagagcaacgagacgccgggcggguacugccugacccgguggaugcugaucgaggccgagcucaagugcuucggcaacaccgccguggccaagugcaacgagaagcacgacgaggaguucugcgacaugcugcgccuguucgacuucaacaagcaggcgauccggcgccucaaggccgaggcccagauguccauccagcugaucaacaaggccgugaacgcccugaucaacgaccagcucaucaugaagaaccaccuccgggacaucauggggauccccuacugcaacuacagcaaguacugguaccugaaccacaccgucacgggccgcaccucccugccccggugcuggcuggugagcaacggguccuaccugaacgagacccacuucagcgacgacaucgagcagcaggcggacaacaugaucaccgagcuccugcagaaggaguacauggaccgccagggcaagacgccccugggccugguggaccucuucgucuucuccaccagcuucuaccugaucuccaucuuccugcaccucgugaagaucccgugaggacuaguuauaagacugacuagcccgaugggccucccaacgggcccuccuccccuccuugcaccgagauuaaucaaaggcucuuuucagagccaccaaaaaaaaaaaaaaaaaaaaaaaaaaaaaaaaaaaaaaaaaaaaaaaaaaaaaaaaaaaaaaaaagaauu

SEQ ID NO: 42964 - RNA, 1541 nt, Artificial Sequence
  mRNA product Design i-3 (hSL-A64-N5) comprising derived and/or modified sequence from LASV(LASV035-NIG-2009;Clade II)__AIT17588__GPCmut13 (opt1)
aggagaaagcuuaccaugggccagaucaucaccuucuuccaggaggugccccacgucaucgaggaggugaugaacaucgugcugaucgcccucagccugcuggccauccucaaggggaucuacaacgucgcgaccugcggccuguucgggcugguguccuuccuccugcugugcggccgcagcugcuccacgaccuacaaggggguguacgagcuccagacccuggagcuggacauggccagccucaacaugaccaugccgcuguccugcacgaagaacaacagccaccacuacaucauggucggcaacgagaccggccuggagcucacccugaccaacacguccaucaucaaccacaaguucugcaaccugagcgacgcccacaagaagaaccucuacgaccacgcccugauguccaucaucagcaccuuccaccuguccauccccaacuucaaccaguacgaggccaugagcugcgacuucaacgggggcaagaucuccgugcaguacaaccucagccacgcguacgccguggacgccgccaaccacugcgggaccaucgcgaacggcguccugcagaccuucaugcggauggccuggggcggguccuacaucgcccuggacagcggcaagggguccugggacugcaucaugacgagcuaccaguaccucaucauccagaacaccaccugggaggaccacugccaguucucccgccccagccccaucggcuaccuggggcugcucagccagcggacccgcgacaucuacaucucccggcgccugcugggcacguucaccuggacccucagcgacuccgagggcaacgagacccccgggggcuacugccugacgcgguggaugcugaucgaggccgagcucaagugcuucgggaacaccgccguggcgaagugcaacgagaagcacgacgaggaguucugcgacaugcugcgccuguucgacuucaacaagcaggccauccggcgccucaaggccgaggcccagaugagcauccagcugaucaacaaggccgugaacgcgcugaucaacgaccagcucaucaugaagaaccaccuccgggacaucaugggcauccccuacugcaacuacuccaaguacugguaccugaaccacaccgucaccgggaagacgagccugccccgcugcuggcugguguccaacggcagcuaccugaacgagacccacuucuccgacgacaucgagcagcaggccgacaacaugaucaccgagcuccugcagaaggaguacaucgaccggcagggcaagaccccgcuggggcugguggaccucuucgucuucagcacguccuucuaccugaucagcaucuuccugcaccucgugaagaucccgugaggacuaguuauaagacugacuagcccgaugggccucccaacgggcccuccuccccuccuugcaccgagauuaaucaaaggcucuuuucagagccaccaaaaaaaaaaaaaaaaaaaaaaaaaaaaaaaaaaaaaaaaaaaaaaaaaaaaaaaaaaaaaaaaagaauu

SEQ ID NO: 42965 - RNA, 1541 nt, Artificial Sequence
  mRNA product Design i-3 (hSL-A64-N5) comprising derived and/or modified sequence from LASV(LASV1000-NIG-2009;Clade II)__AIT17782__GPCmut13 (opt1)
aggagaaagcuuaccaugggccagaucaucaccuucuuccaggaggugccccacgucaucgaggaggugaugaacaucgugcugaucgcccucagccugcuggccauccucaaggggaucuacaacgucgcgaccugcggccuguucgggcugguguccuuccuccugcugugcggccgcagcugcuccacgaccuacaaggggguguacgagcuccagacccuggagcuggacauggccagccucaacaugaccaugccgcuguccugcacgaagaacaacagccaccacuacaucauggucggcaacgagaccggccuggagcucacccugaccaacacguccaucaucaaccacaaguucugcaaccugagcgacgcccacaagaagaaccucuacgaccacgcccugauguccaucaucagcaccuuccaccuguccauccccaacuucaaccaguacgaggccaugagcugcgacuucaacgggggcaagaucuccgugcaguacaaccucagccacaccuacgcgguggacgccgccaaccacugcgggaccaucgccaacggcguccugcagacguucaugcggauggcguggggcggguccuacaucgcccuggacagcggcaagggguccugggacugcaucaugaccagcuaccaguaccucaucauccagaacaccaccugggaggaccacugccaguucucccgccccagccccaucggcuaccuggggcugcucagccagcggacgcgcgacaucuacaucucccggcgccugcugggcaccuucaccuggacccucagcgacuccgagggcaacgagacgcccgggggcuacugccugacccgguggaugcugaucgaggccgagcucaagugcuucgggaacaccgccguggccaagugcaacgagaagcacgacgaggaguucugcgacaugcugcgccuguucgacuucaacaagcaggcgaucaagcggcucaagaccgaggcccagaugagcauccagcugaucaacaaggccgugaacgcccugaucaacgaccagcucaucaugaagaaccaccuccgcgacaucaugggcauccccuacugcaacuacuccaaguacugguaccugaaccacacggucaccgggaagaccagccugccccggugcuggcugguguccaacggcagcuaccugaacgagacccacuucuccgacgacaucgagcagcaggccgacaacaugaucacggagcuccugcagaaggaguacaucgaccgccagggcaagaccccgcuggggcugguggaccucuucgucuucagcaccuccuucuaccugaucagcaucuuccugcaccucgugaagaucccgugaggacuaguuauaagacugacuagcccgaugggccucccaacgggcccuccuccccuccuugcaccgagauuaaucaaaggcucuuuucagagccaccaaaaaaaaaaaaaaaaaaaaaaaaaaaaaaaaaaaaaaaaaaaaaaaaaaaaaaaaaaaaaaaaagaauu

SEQ ID NO: 42966 - RNA, 1541 nt, Artificial Sequence
  mRNA product Design i-3 (hSL-A64-N5) comprising derived and/or modified sequence from LASV(LASV221-NIG-2010;Clade II)__AIT17624__GPCmut13 (opt1)
aggagaaagcuuaccaugggccagaucaucaccuucuuccaggaggugccccacgucaucgaggaggugaugaacaucgugcugaucgcccucagccugcuggccauccucaaggggaucuacaacgucgcgaccugcggccuguucgggcugguguccuuccuccugcugugcggccgcagcugcuccacgaccuacaaggggguguacgagcuccagacccuggagcuggacauggccagccucaacaugaccaugccgcuguccugcacgaagaacaacagccaccacuacaucauggucggcaacgagaccggccuggagcucacccugaccaacacguccaucaucaaccacaaguucugcaaccugagcgacgcccacaagaagaaccucuacgaccacgcccugauguccaucaucagcaccuuccaccuguccauccccaacuucaaccaguacgaggccaugagcugcgacuucaacgggggcaagaucuccgugcaguacaaccucagccacaccuacgcgaucgacgccgccaaccacugcgggaccaucgccaacggcgugcugcagacguucaugcggauggcguggggcggguccuacaucgcccuggacagcggcaagggguccugggacugcaucaugaccagcuaccaguaccucaucauccagaacaccaccugggaggaccacugccaguucucccgccccagccccaucggcuaccuggggcugcucagccagcggacgcgcgacaucuacaucucccggcgccugcugggcaccuucaccuggacccucagcgacuccgagggcaacgagacgcccgggggcuacugccugacccgguggaugcugaucgaggccgagcucaagugcuucgggaacaccgccgucgccaagugcaacgagaagcacgacgaggaguucugcgacaugcugcgccuguucgacuucaacaagcaggcgauccggcgccucaagaccgaggcccagaugagcauccagcugaucaacaaggccgugaacgcccugaucaacgaccagcucaucaugaagaaccaccuccgggacaucaugggcauccccuacugcaacuacuccaaguacugguaccugaaccacacggugaccgggaagaccagccugccccgcugcuggcuggucuccaacggcagcuaccugaacgagacccacuucuccgacgacaucgagcagcaggccgacaacaugaucacggagaugcuccagaaggaguacauggaccggcagggcaagaccccgcuggggcugguggaccuguucguguucagcaccuccuucuaccucaucagcaucuuccugcaccuggucaagaucccgugaggacuaguuauaagacugacuagcccgaugggccucccaacgggcccuccuccccuccuugcaccgagauuaaucaaaggcucuuuucagagccaccaaaaaaaaaaaaaaaaaaaaaaaaaaaaaaaaaaaaaaaaaaaaaaaaaaaaaaaaaaaaaaaaagaauu

SEQ ID NO: 42967 - RNA, 1541 nt, Artificial Sequence
  mRNA product Design i-3 (hSL-A64-N5) comprising derived and/or modified sequence from LASV(LASV237-NIG-2010;Clade II)__AIT17638__GPCmut13 (opt1)
aggagaaagcuuaccaugggccagaucaucaccuucuuccaggaggugccccacgucaucgaggaggugaugaacaucgugcugaucgcccucagccugcuggccauccucaaggggaucuacaacgucgcgaccugcggccuguucgggcugguguccuuccuccugcugugcggccgcagcugcuccacgaccuacaaggggguguacgagcuccagacccuggagcuggacauggccagccucaacaugaccaugccgcuguccugcacgaagaacaacagccaccacuacaucauggucggcaacgagaccggccuggagcucacccugaccaacacguccaucaucaaccacaaguucugcaaccugagcgacgcccacaagaaggaccucuacgaccacgcccugauguccaucaucagcaccuuccaccuguccauccccaacuucaaccaguacgaggccaugagcugcgacuucaacgggggcaagaucuccgugcaguacaaccucagccacaccuacgcgguggacgccgccaaccacugcgggaccaucgccaacggcguccugcagacguucaugcggauggcguggggcggguccuacaucgcccuggacagcggcaagggguccugggacugcaucaugaccagcuaccaguaccucaucauccagaacaccaccugggaggaccacugccaguucucccgccccagccccaucggcuaccuggggcugcucagccagcggacgcgcgacaucuacaucucccggcgccugcugggcaccuucaccuggacccucagcgacuccgagggcaacgagacgcccgggggcuacugccugacccgguggaugcugaucgaggccgagcucaagugcuucgggaacaccgccguggccaagugcaacgagaagcacgacgaggaguucugcgacaugcugcgccuguucgacuucaacaagcaggcgauccggcgccucaagaccgaggcccagaugagcauccagcugaucaacaaggccgugaacgcccugaucaacgaccagcucaucaugaagaaccaccuccgggacaucaugggcauccccuacugcaacuacuccaaguacugguaccugaaccacacggucaccgggaagaccagccugccccgcugcuggcugguguccaacggcagcuaccugaacgagacccacuucuccgacgacaucgagcagcaggccgacaacaugaucacggagcuccugcagaaggaguacauggaccggcagggcaagaccccgcuggggcugguggaccucuucgucuucagcaccuccuucuaccugaucagcaucuuccugcaccucaucaagaucccgugaggacuaguuauaagacugacuagcccgaugggccucccaacgggcccuccuccccuccuugcaccgagauuaaucaaaggcucuuuucagagccaccaaaaaaaaaaaaaaaaaaaaaaaaaaaaaaaaaaaaaaaaaaaaaaaaaaaaaaaaaaaaaaaaagaauu

SEQ ID NO: 42968 - RNA, 1541 nt, Artificial Sequence
  mRNA product Design i-3 (hSL-A64-N5) comprising derived and/or modified sequence from LASV(LASV253-NIG-2011;Clade II)__AIT17670__GPCmut13 (opt1)
aggagaaagcuuaccaugggccagaucaucaccuucuuccaggaggugccccacgucaucgaggaggugaugaacaucgugcugaucgcccucagccugcuggccauccucaaggggaucuacaacgucgcgaccugcggccuguucgggcugguguccuuccuccugcugugcggccgcagcugcuccacgaccuacaaggggguguacgagcuccagacccuggagcuggacauggccagccucaacaugaccaugccgcuguccugcacgaagaacaacagccaccacuacaucauggucggcaacgagaccggccuggagcucacccugaccaacacguccaucaucaaccacaaguucugcaaccugagcgacgcccacaagaagaaccucuacgaccacgcccugauguccaucaucagcaccuuccaccuguccauccccaacuucaaccaguacgaggccaugagcugcgacuucaacgggggcaagaucuccgugcaguacaaccucagccacaccuacgcgguggacgccgccaaccacugcgggaccaucgccaacggcguccugcagacguucaugcggauggcguggggcggguccuacaucgcccuggacagcggcaagggguccugggacugcaucaugaccagcuaccaguaccucaucauccagaacaccaccugggaggaccacugccaguucucccgccccagccccaucggcuaccuggggcugcucagccagcggacgcgcgacaucuacaucucccggcgccugcugggcaccuucaccuggacccucagcgacuccgagggcaacgagacgcccgggggcuacugccugacccgguggaugcugaucgaggccgagcucaagugcuucgggaacaccgccguggccaagugcaacgagaagcacgacgaggaguucugcgacaugcugcgccuguucgacuucaacaagcaggcgauccggcgccucaaggccgaggcccagaugagcauccagcugaucaacaaggccgugaacgcccugaucaacgaccagcucaucaugaagaaccaccuccgggacaucaugggcaucccguacugcaacuacuccaaguacugguaccugaaccacaccgucacggggcgcaccagccugccccggugcuggcugguguccaacggcagcuaccugaacgagacccacuucuccgacgacaucgagcagcaggcggacaacaugaucaccgagcuccugcagaaggaguacaucgaccgccagggcaagacgccccuggggcugguggaccucuucgucuucagcaccuccuucuaccugaucagcaucuuccugcaccucgugaagaucccgugaggacuaguuauaagacugacuagcccgaugggccucccaacgggcccuccuccccuccuugcaccgagauuaaucaaaggcucuuuucagagccaccaaaaaaaaaaaaaaaaaaaaaaaaaaaaaaaaaaaaaaaaaaaaaaaaaaaaaaaaaaaaaaaaagaauu

SEQ ID NO: 42969 - RNA, 1541 nt, Artificial Sequence
  mRNA product Design i-3 (hSL-A64-N5) comprising derived and/or modified sequence from LASV(LASV254-NIG-2011;Clade II)__AIT17674__GPCmut13 (opt1)
aggagaaagcuuaccaugggccagaucaucaccuucuuccaggaggugccccacgucaucgaggaggugaugaacaucgugcugaucgcccucagccugcuggccauccucaaggggaucuacaacgucgcgaccugcggccuguucgggcugguguccuuccuccugcugugcggccgcagcugcuccacgaccuacaaggggguguacgagcuccagacccuggagcuggacaugaccaaccucaacaugacgaugccgcugagcugcaccaagaacaacucccaccacuacaucauggucggcaacgagaccggccuggagcucacccugacgaacaccagcaucaucaaccacaaguucugcaaccuguccgacgcccacaagaagaaccucuacaaccacgcccugaugagcaucaucuccaccuuccaccugagcauccccaacuucaaccaguacgaggccauguccugcgacuucaacgggggcaagaucagcgugcaguacaaccucucccacagcuacgccguggacgcggccaaccacugcgggaccaucgccaacggcguccugcagacguucaugcggauggccuggggcggguccuacaucgcgcuggacagcggcaaggggaacugggacugcaucaugaccuccuaccaguaccucaucauccagaacaccaccugggaggaccacugccaguucagccgccccucccccaucggcuaccuggggcugcucagccagcggacgcgcgacaucuacaucagccggcgccugcugggcaccuucaccuggacccucuccgacagcgagggcaacgagacgcccgggggcuacugccugacccgguggaugcugaucgaggccgagcucaagugcuucgggaacaccgccguggccaagugcaacgagaagcacgacgaggaguucugcgacaugcugcgccuguucgacuucaacaagcaggccauccggcgccucaagaccgaggcgcaggccaacauccagcugaucaacaaggccgugaacgcccugaucaacgaccagcucaucaugaagaaccaccuccgggacaucaugggcauccccuacugcaacuacuccaaguacugguaccugaaccacacggucaccgggaagaccagccugccccgcugcuggcugguguccaacggcagcuaccugaacgagacccacuucuccgacgacaucgagcagcaggccgacaacaugaucacggagcuccugcagaaggaguacauggaccggcagggcaagaccccgcuggggcugguggaccucuucgucuucagcaccuccuucuaccugaucagcaucuuccugcaccucgugaagaucccgugaggacuaguuauaagacugacuagcccgaugggccucccaacgggcccuccuccccuccuugcaccgagauuaaucaaaggcucuuuucagagccaccaaaaaaaaaaaaaaaaaaaaaaaaaaaaaaaaaaaaaaaaaaaaaaaaaaaaaaaaaaaaaaaaagaauu

SEQ ID NO: 42970 - RNA, 1541 nt, Artificial Sequence
  mRNA product Design i-3 (hSL-A64-N5) comprising derived and/or modified sequence from LASV(Nig08-A19;Clade III)__ADU56618__GPCmut13 (opt1)
aggagaaagcuuaccaugggccagaucgugaccuucuuccaggaggucccccacgugaucgaggaggugaugaacaucguccugaucgcccucagcauccuggccauccugaaggggcucuacaacaucgcgaccugcggccugaucgggcuggugacguuccuccugcuguccggccgcagcugcuccaugaccuacaaggggguguacgagcuccagacccuggagcugaacaugaacacccucaacaugacgaugccgcugagcugcaccaagaacaacucccaccacuacaucauggucggcaacgagaccggccuggagcucacccugacgaacaccagccugcuccaccacaaguucugcaaccuguccgacgcccacaagaagaaccuguacgaccacacccucaugagcaucaucuccaccuuccaccugagcauccccaacuucaaccaguacgaggccauguccugcgacuucaacgggggcaagaucacggugcaguacaaccugagccacuccuacgccaucgacgccgcgaaccacugcgggaccguggccaacggcguccuccagaccuucaugcggauggccuggggcgggagcuacaucgcccuggacuccggccgcgggaagugggacugcaucaugaccagcuaccaguaccugaucauccagaacacgaccugggaggaccacugccaguucucccggcccagccccaucggcuaccucgggcugcugucccagcgcacccgggacaucuacaucagccgccggcuccugggcaccuucacguggacccugagcgacuccgagggcaacgagacccccgggggcuacugccucacccgcuggaugcugaucgaggcggagcugaagugcuucgggaacacggccguggccaagugcaacgagaagcacgacgaggaguucugcgacaugcuccggcuguucgacuucaacaagcaggccauccgccggcugaaggccgaggcgcagaugagcauccagcucaucaacaaggccgugaacgcccugaucaacgaccagcugaucaugaagaaccaccuccgcgacaucaugggcauccccuacugcaacuacuccaaguacugguaccugaaccacaccagcaccgggcggaccucccugccccgcugcuggcucgucagcaacggcuccuaccugaacgagacgcacuucagcgacgacaucgagcagcaggccgacaacaugaucaccgagaugcugcagaaggaguaccuggaccggcagggcaagaccccgcucgggcugguggaccuguucguguucuccaccagcuucuaccucaucuccaucuuccugcaccuggucaagaucccgugaggacuaguuauaagacugacuagcccgaugggccucccaacgggcccuccuccccuccuugcaccgagauuaaucaaaggcucuuuucagagccaccaaaaaaaaaaaaaaaaaaaaaaaaaaaaaaaaaaaaaaaaaaaaaaaaaaaaaaaaaaaaaaaaagaauu

SEQ ID NO: 42971 - RNA, 1544 nt, Artificial Sequence
  mRNA product Design i-3 (hSL-A64-N5) comprising derived and/or modified sequence from LASV(G1180-SLE-2010;Clade IV)__AIT17168__GPCmut13 (opt1)
aggagaaagcuuaccaugggccagaucgugaccuucuuccaggaggucccccacgugaucgaggaggugaugaacaucguccugaucgcccucagcauccuggccgugcugaaggggcucuacaacuucgcgaccugcggccugguggggcugcucaccuuccugcugcucugcggccgcuccugcaccgccagccgguacaagggggucuacgagcugcagacccuggagcucaacauggagacccugaacaugacgaugccgcuguccugcaccaagaacaacagccaccacuacaucauggugggcaacgagaccggccucgagcugacccugacgaacaccuccaucaucaaccacaaguucugcaaccucagcgacgcccacaagaagaaccuguacgaccacgcccugauguccaucaucagcaccuuccaccucuccauccccaacuucaaccaguacgaggccaugagcugcgacuucaacgggggcaagaucuccgugcaguacaaccugagccacuccuacgcgggggacgccgccaaccacugcggcaccgucgccaacggggugcugcagacguucaugcgcauggcguggggcggcagcuacaucgcccucgacuccgggcacggcagcugggacugcaucaugaccuccuaccaguaccugaucauccagaacaccaccugggaggaccacugccaguucagccggcccucccccaucggguaccugggccuccugagccagcgcacgcgggacaucuacaucagccgccggcugcucggcaccuucaccuggacccuguccgacagcgaggggaaggacacgccgggcggguacugccugacccgcuggaugcucaucgaggccgagcugaagugcuucggcaacaccgccguggccaagugcaacgagaagcacgacgaggaguucugcgacaugcugcggcuguucgacuucaacaagcaggcgauccagcgccugaaggccgaggcccagauguccauccagcugaucaacaaggccgucaacgcccucaucaacgaccagcugaucaugaagaaccaccuccgggacaucauggggauccccuacugcaacuacagcaaguacugguaccucaaccacaccacgaccggcaagaccucccugcccaagugcuggcuggugagcaacggcuccuaccucaacgagacccacuucagcgacgacaucgagcagcaggcggacaacaugaucacggagaugcugcagaaggaguacauggagcgccaggggaagacgccccugggccugguggaccucuucgucuucuccaccagcuucuaccugaucuccaucuuccugcaccucgugaagaucccgugaggacuaguuauaagacugacuagcccgaugggccucccaacgggcccuccuccccuccuugcaccgagauuaaucaaaggcucuuuucagagccaccaaaaaaaaaaaaaaaaaaaaaaaaaaaaaaaaaaaaaaaaaaaaaaaaaaaaaaaaaaaaaaaaagaauu

SEQ ID NO: 42972 - RNA, 1544 nt, Artificial Sequence
  mRNA product Design i-3 (hSL-A64-N5) comprising derived and/or modified sequence from LASV(G1442-SLE-2011;Clade IV)__AIT17180__GPCmut13 (opt1)
aggagaaagcuuaccaugggccagaucgugaccuucuuccaggaggucccccacgugaucgaggaggugaugaacaucguccugaucgcccucagcauccuggccgugcugaaggggcucuacaacguggcgaccugcggccugaucgggcuggucacguuccuccugcugugcggccgcuccugcaccaccacccucuacaaggggguguacgagcugcagacgcuggagcucaacauggagacccugaacaugaccaugccgcugagcugcaccaagaacaacucccaccacuacauccgggugggcaacgagacgggccucgagcugacccugaccaacaccagcaucaucaaccacaaguucugcaaccucuccgacgcccacaagaagaaccuguacgaccacgcccugaugagcaucaucuccacguuccaccucagcauccccaacuucaaccaguacgaggccauguccugcgacuucaacgggggcaagaucagcguccaguacaaccugucccacagcuacgccggggacgcggccaaccacugcggcaccguggccaacggggugcugcagaccuucaugcgcauggccuggggcggcuccuacaucgcgcucgacagcgggcggggcaacugggacugcaucaugaccuccuaccaguaccugaucauccagaacacgaccugggacgaccacugccaguucagccgccccucccccaucggguaccugggccuccugagccagcggacccgcgacgucuacaucucccggcgccugcucggcaccuucacguggacccugagcgacagcgaggggaaggacaccccgggcggguacugccugacccgguggaugcucaucgaggccgagcugaagugcuucggcaacacggccguggccaagugcaacgagaagcacgacgaggaguucugcgacaugcugcgccucuucgacuucaacaagcaggccauccagcggcugaaggcggaggcccagauguccauccagcugaucaacaaggccgugaacgcccucaucaacgaccagcugaucaugaagaaccaccuccgcgacaucauggggauccccuacugcaacuacagcaaguacugguaccugaacaacaccgccaccggcaagaccucccugcccaagugcuggcugaucagcaacggcuccuaccucaacgagacgcacuucagcgacgacaucgagcaggaggcggacaacaugaucaccgagaugcugcagaaggaguacauggagcggcaggggaagacgccccugggccuggucgaccucuucguguucuccaccagcuucuaccugaucuccaucuuccugcaccucgugaagaucccgugaggacuaguuauaagacugacuagcccgaugggccucccaacgggcccuccuccccuccuugcaccgagauuaaucaaaggcucuuuucagagccaccaaaaaaaaaaaaaaaaaaaaaaaaaaaaaaaaaaaaaaaaaaaaaaaaaaaaaaaaaaaaaaaaagaauu

SEQ ID NO: 42973 - RNA, 1544 nt, Artificial Sequence
  mRNA product Design i-3 (hSL-A64-N5) comprising derived and/or modified sequence from LASV(G3010-SLE-2013;Clade IV)__AIT17344__GPCmut13 (opt1)
aggagaaagcuuaccaugggccagaucgugaccuucuuccaggaggucccccacgugaucgaggaggugaugaacaucguccugaucgcccucagcauccuggccgugcugaaggggcucuacaacuucgcgaccugcggccugguggggcuggucacguuccuccugcugugcggccgcuccugcaccaccagccucuacaaggggguguacgagcugcagacccuggagcucaacauggagacgcugaacaugaccaugccgcuguccugcaccaagaacaacagccaccacuacaucauggugggcaacgagaccggccucgagcugacgcugaccaacaccuccaucaucaaccacaaguucugcaaccucagcgacgcccacaagaagaaccuguacaaccacgcccugauguccaucaucagcaccuuccaccucuccauccccaacuucaaccaguacgaggccaugagcugcgacuucaacgggggcaagaucuccguccaguacaaccugagccacuccuacgccggggacgcggccagccacugcggcacgguggccaacggggugcugcagaccuucaugcggauggccuggggcggcuccuacaucgcgcucgacagcggguacggcaagugggacugcaucaugaccuccuaccaguaccugaucauccagaacaccacgugggaggaccacugccaguucagccgccccucccccaucggguaccugggccuccugagccagcggacccgcgacaucuacaucagccggcgccugcucggcaccuucaccuggacgcuguccgacagcgaggggaaggacaccccgggcggguacugccugacccgguggaugcucaucgaggccgagcugaagugcuucggcaacaccgccgucgccaagugcaacgagaagcacgacgaggaguucugcgacaugcugcgccucuucgacuucaacaagcaggccauccagcggcugaagacggaggcgcagauguccauccagcugaucaacaaggccgugaacgcccucaucaacgaccagcugaucaugaagaaccaccuccgcgacaucauggggauccccuacugcaacuacagcaaguacugguaccugaaccacaccaccaccggcaagacgucccugcccaagugcuggcuggugagcaacggcuccuaccucaacgagacccacuucagcgacgacaucgagcagcaggccgacaacaugaucaccgagaugcugcagaaggaguacauggagcggcaggggaagacgccccugggccuggucgaccucuucguguucuccaccagcuucuaccugaucuccaucuuccugcaccucgugaagaucccgugaggacuaguuauaagacugacuagcccgaugggccucccaacgggcccuccuccccuccuugcaccgagauuaaucaaaggcucuuuucagagccaccaaaaaaaaaaaaaaaaaaaaaaaaaaaaaaaaaaaaaaaaaaaaaaaaaaaaaaaaaaaaaaaaagaauu

SEQ ID NO: 42974 - RNA, 1544 nt, Artificial Sequence
  mRNA product Design i-3 (hSL-A64-N5) comprising derived and/or modified sequence from LASV(G502-SLE-2009;Clade IV)__AIT17126__GPCmut13 (opt1)
aggagaaagcuuaccaugggccagaucgugaccuucuuccaggaggucccccacgugaucgaggaggugaugaacaucguccugaucgcccucagcauccuggccgugcugaaggggcucuacaacuucgcgaccugcggccugguggggcugcucacguuccugcugcucugcggccgcuccugcaccaccgggcuguacaagggcgucuacgagcugcagacccucgagcugaacauggagacgcugaacaugaccaugccgcucagcugcaccaagaacaacucccaccacuacaucauggugggcaacgagaccgggcuggagcugacgcucaccaacaccagcaucaucaaccacaaguucugcaaccuguccgacgcccacaagaagaaccuguacgaccacgcccucaugagcaucaucuccaccuuccaccugagcauccccaacuucaaccaguacgaggccauguccugcgacuucaacggcgggaagaucagcgugcaguacaaccugucccacagcuacgccggcgacgcggccgaccacugcgggacggucgccaacggcgugcuccagaccuucaugcggauggccuggggcggguccuacaucgcgcuggacagcggccgcgggcggugggacugcaucaugaccuccuaccaguaccugaucauccagaacaccacgugggaggaccacugccaguucagccgccccucccccaucggcuaccucggccugcugagccagcggacccgcgacaucuacaucucccggcgccuccuggggaccuucaccuggacgcugagcgacagcgagggcaaggacacccccgggggcuacugccucacccgguggaugcugaucgaggccgagcugaagugcuucgggaacaccgccguggccaagugcaacgagaagcacgacgaggaguucugcgacaugcuccgccuguucgacuucaacaagcaggccauccagcggcugaaggcggaggcccagauguccauccagcucaucaacaaggccgucaacgcccugaucaacgaccagcuggugaugaagaaccaccuccgcgacaucaugggcauccccuacugcaacuacagccgguacugguaccugaaccacacgaccaccggccgcaccucccugcccaagugcuggcucgugagcaacggguccuaccugaacgagacgcacuucagcgacgacaucgagcagcaggccgacaacaugaucaccgagaugcugcagaaggaguacauggagcggcagggcaagaccccgcuggggcucgucgaccuguucguguucuccaccagcuucuaccugaucuccaucuuccuccaccuggugaagaucccgugaggacuaguuauaagacugacuagcccgaugggccucccaacgggcccuccuccccuccuugcaccgagauuaaucaaaggcucuuuucagagccaccaaaaaaaaaaaaaaaaaaaaaaaaaaaaaaaaaaaaaaaaaaaaaaaaaaaaaaaaaaaaaaaaagaauu

SEQ ID NO: 42975 - RNA, 1544 nt, Artificial Sequence
  mRNA product Design i-3 (hSL-A64-N5) comprising derived and/or modified sequence from LASV(G733-SLE-2010;Clade IV)__AIT17154__GPCmut13 (opt1)
aggagaaagcuuaccaugggccagaucgugaccuucuuccaggaggucccccacgugaucgaggaggugaugaacaucguccugaucgcccucagcauccuggccgugcugaaggggcucuacaacuucgcgaccugcggcaucguggggcuggucuccuuccugcuccugugcggccgcagcugcacgaccucccuguacaaggggguguacgagcuccagacccuggagcugaacauggagacccucaacaugacgaugccgcugagcugcaccaagaacaacucccaccacuacaucauggugggcaacgagaccggccuggagcucacccugacgaacaccagcaucaucaaccacaaguucugcaaccuguccgacgcccacaagaagaaccucuacgaccacgcccugaugagcaucaucuccaccuuccaccugagcauccccaacuucaaccaguacgaggccauguccugcgacuucaacgggggcaagaucagcguccaguacaaccucucccacagcuacgccggggacgcggccaaccacugcggcaccaucgccaacggggugcugcagacguucaugcggauggccuggggcggcuccuacaucgcgcuggacagcgggcgcgaccggugggacugcaucaugaccuccuaccaguaccucaucauccagaacaccaccugggaggaccacugccaguucagccgccccucccccaucggcuaccuggggcugcucagccagcggacgcgcgacaucuacaucagccggcgccugcugggcaccuucaccuggacccucuccgacagcgagggcaaggacacgcccgggggcuacugccugacccgguggaugcugaucgaggccgagcucaagugcuucgggaacaccgccguggccaagugcaacgagaagcacgacgaggaguucugcgacaugcugcgccuguucgacuucaacaagcaggccauccagcggcucaaggcggaggcccagauguccauccagcugaucaacaaggccgucaacgcccugaucaacgaccagcucaucaugaagaaccaccuccgcgacaucaugggcauccccuacugcaacuacagcaaguacugguaccugaaccacaccacgaccgggaagaccucccugcccaagugcuggcuggugagcaacggcuccuaccugaacgagacccacuucagcgacgacaucgagcagcaggccgacaacaugaucacggagaugcuccagaaggaguacauggagcggcagggcaagaccccgcuggggcugguggaccuguucgucuucuccaccagcuucuaccucaucuccaucuuccugcaccuggugaagaucccgugaggacuaguuauaagacugacuagcccgaugggccucccaacgggcccuccuccccuccuugcaccgagauuaaucaaaggcucuuuucagagccaccaaaaaaaaaaaaaaaaaaaaaaaaaaaaaaaaaaaaaaaaaaaaaaaaaaaaaaaaaaaaaaaaagaauu

SEQ ID NO: 42976 - RNA, 1544 nt, Artificial Sequence
  mRNA product Design i-3 (hSL-A64-N5) comprising derived and/or modified sequence from MOPV/LASV reassortant(IGS-1;Clade IV)__AFY05576__GPCmut13 (opt1)
aggagaaagcuuaccaugggccagaucgugaccuucuuccaggaggucccccacgugaucgaggaggugaugaacaucguccugaucgcccucagcgugcuggccgugcugaaggggcucuacaacuucgcgaccugcggccuggucgggcuggugacguuccuccugcugugcggccgcuccugcaccaccagccucuacaaggggguguacgagcugcagacccuggagcucaacauggagacgcugaacaugaccaugccgcuguccugcaccaagaacaacagccaccacuacaucauggucggcaacgagaccggccucgagcugacgcugaccaacaccuccaucaucaaccacaaguucugcaaccucagcgacgcccacaagaagaaccuguacgaccacgcccugauguccaucaucagcaccuuccaccucuccauccccaacuucaaccaguacgaggccaugagcugcgacuucaacgggggcaagaucuccgugcaguacaaccugagccacuccuacgccggggacgcggccaaccacugcggcacgguggccaacgggguccugcagaccuucaugcggauggccuggggcggcagcuacaucgcgcucgacuccgggcgcggcaacugggacugcaucaugaccagcuaccaguaccugaucauccagaacaccacgugggaggaccacugccaguucucccggcccagccccaucggguaccugggccuccugucccagcgcacccgggacaucuacaucagccgccggcugcucggcaccuucaccuggacgcugagcgacuccgagggggaggacaccccgggcggguacugccugacccgcuggaugcucaucgaggccgagcugaagugcuucggcaacaccgccguggccaagugcaacgagaagcacgacgaggaguucugcgacaugcugcggcuguucgacuucaacaagcaggccauccagcgccugaaggcggaggcccagaugagcauccagcugaucaacaaggccgugaacgcccucaucaacgaccagcugaucaugaagaaccaccuccgggacaucauggggauccccuacugcaacuacuccaaguacugguaccucaaccacacgaccaccggccgcaccagccugcccaagugcuggcuggucuccaacggcagcuaccucaacgagacgcacuucuccgacgacaucgagcagcaggccgacaacaugaucaccgagaugcugcagaaggaguacauggagcggcaggggaagacgccccugggccugguggaccucuucguguucagcaccuccuucuaccugaucagcaucuuccugcaccucgucaagaucccgugaggacuaguuauaagacugacuagcccgaugggccucccaacgggcccuccuccccuccuugcaccgagauuaaucaaaggcucuuuucagagccaccaaaaaaaaaaaaaaaaaaaaaaaaaaaaaaaaaaaaaaaaaaaaaaaaaaaaaaaaaaaaaaaaagaauu

SEQ ID NO: 42977 - RNA, 1544 nt, Artificial Sequence
  mRNA product Design i-3 (hSL-A64-N5) comprising derived and/or modified sequence from LASV(LM765-SLE-2012;Clade IV)__AIT17814__GPCmut13 (opt1)
aggagaaagcuuaccaugggccagaucgugaccuucuuccaggaggucccccacgugaucgaggaggugaugaacaucguccugaucgcccucagcauccuggccgugcugaaggggcucuacaacuucgcgaccugcggccugguggggcuggucacguuccuccugcugugcggccgcuccugcaccaccagccucuacaaggggguguacgagcugcagacccuggagcucaacauggagacgcugaacaugaccaugccgcuguccugcaccaagaacaacagccaccacuacaucauggugggcaacgagaccggccucgagcugacgcugaccaacaccuccaucaucgaccacaaguucugcaaccucagcgacgcccaccggaagaaccuguacgaccacgcccugauguccaucaucagcaccuuccaccucuccauccccaacuucaaccaguacgaggccaugagcugcgacuucaacgggggcaagaucuccguccaguacaaccugagccacuccuacgccaaggacgcggccgaccacugcgggacgguggccaacggcgugcugcagaccuucaugcgcauggccuggggcgggagcuacaucgcgcucgacuccggccgggggcgcugggacugcaucaugaccagcuaccaguaccugaucauccagaacaccacgugggaggaccacugccaguucucccggcccagccccaucggcuaccuggggcuccugucccagcgcacccgggacaucuacaucagccgccggcugcucggcaccuucaccuggacgcugagcgacuccgagggcaaggacacccccgggggcuacugccugacccgcuggaugcucaucgaggccgagcugaagugcuucgggaacaccgccgucgccaagugcaacgagaagcacgacgaggaguucugcgacaugcugcggcuguucgacuucaacaagcaggccauccagcgccugaaggcggaggcccagaugagcauccagcugaucaacaaggccgugaacgcccucaucaacgaccagcugaucaugaagaaccaccuccgggacaucaugggcauccccuacugcaacuacuccaaguacugguaccucaaccacacgaccaccgggaagaccagccugcccaagugcuggcugguguccaacggcagcuaccucaacgagacgcacuucuccgacgacaucgagcagcaggccgacaacaugaucaccgagaugcugcagaaggaguacauggagcgccagggcaagaccccgcuggggcuggucgaccucuucguguucagcaccuccuucuaccugaucagcaucuuccugcaccucgugaagaucccgugaggacuaguuauaagacugacuagcccgaugggccucccaacgggcccuccuccccuccuugcaccgagauuaaucaaaggcucuuuucagagccaccaaaaaaaaaaaaaaaaaaaaaaaaaaaaaaaaaaaaaaaaaaaaaaaaaaaaaaaaaaaaaaaaagaauu

SEQ ID NO: 42978 - RNA, 1544 nt, Artificial Sequence
  mRNA product Design i-3 (hSL-A64-N5) comprising derived and/or modified sequence from LASV(LM776-SLE-2012;Clade IV)__AIT17824__GPCmut13 (opt1)
aggagaaagcuuaccaugggccagaucgugaccuucuuccaggaggucccccacgugaucgaggaggugaugaacaucguccugaucgcccucagcauccuggccgugcugaaggggcucuacaacuucgcgaccugcggccugguggggcuggucacguuccuccugcugugcggccgcuccugcaccaccagcguguacaaggggguguacgagcuccagacccuggagcugaacauggagacgcucaacaugaccaugccgcuguccugcaccaagaacaacagccaccacuacaucauggucggcaacgagaccggccuggagcucacgcugaccaacaccuccaucaucaaccacaaguucugcaaccugagcgacgcccacaagaagaaccucuacgaccacgcccugauguccaucaucagcaccuuccaccuguccauccccaacuucaaccaguacgaggccaugagcugcgacuucaacgggggcaagaucuccgugcaguacaaccucagccacuccuacgccggggacgcggccaaccacugcggcacgguggccaacgggguccugcagaccuucaugcggauggccuggggcggcagcuacaucgcgcuggacuccgggcacggcaagugggacugcaucaugaccagcuaccaguaccucaucauccagaacaccacgugggaggaccacugccaguucucccgccccagccccaucggguaccugggccugcucucccagcggacccgcgacaucuacaucagccggcgccugcugggcaccuucaccuggacgcucagcgacuccgaggggaaggacaccccgggcggguacugccugacccgguggaugcugaucgaggccgagcucaagugcuucggcaacaccgccguggccaagugcaacgagaagcacgacgaggaguucugcgacaugcugcgccuguucgacuucaacaagcaggccauccagcggcucaaggcggaggcccagaugagcauccagcugaucaacaaggccgugaacgcccugaucaacgaccagcucaucaugaagaaccaccuccgcgacaucauggggauccccuacugcaacuacuccaaguacugguaccugaaccacacgaccaccggcaagaccagccugcccaagugcuggcuggucuccaacggcagcuaccugaacgagacgcacuucuccgacgacaucgagcagcaggccgacaacaugaucaccgagaugcuccagaaggaguacauggagcggcaggggaagacgccccugggccugguggaccuguucguguucagcaccuccuucuaccucaucagcaucuuccugcaccuggucaagaucccgugaggacuaguuauaagacugacuagcccgaugggccucccaacgggcccuccuccccuccuugcaccgagauuaaucaaaggcucuuuucagagccaccaaaaaaaaaaaaaaaaaaaaaaaaaaaaaaaaaaaaaaaaaaaaaaaaaaaaaaaaaaaaaaaaagaauu

SEQ ID NO: 42979 - RNA, 1544 nt, Artificial Sequence
  mRNA product Design i-3 (hSL-A64-N5) comprising derived and/or modified sequence from LASV(Mad39;Clade IV)__ANH09722__GPCmut13 (opt1)
aggagaaagcuuaccaugggccagaucgugaccuucuuccaggaggucccccacgugaucgaggaggugaugaacaucguccugaucgcccucagcauccuggccgugcugaaggggcucuacaacguggcgaccugcggccugaucgggcuggucacguuccuccugcugugcggccgcuccugcaccaccacccucuacaaggggguguacgagcugcaggcccuggagcucaacauggagacgcugaacaugaccaugccgcugagcugcaccaagaacaacucccaccacuacauccgggugggcaacgagaccggccucgagcugacgcugaccaacaccagccucaucaaccacaaguucugcaaccuguccgacgcccacaagaagaaccuguacgaccacgcccucaugagcaucaucuccaccuuccaccugagcauccccaacuucaaccaguacgaggccauguccugcgacuucaacgacgggaagaucagcguccaguacaaccugucccacacguacgcgggcgacaccgccaaccacugcgggaccguggccaacggcgugcuccagaccuucaugcgcauggccuggggcgggagcuacaucgcgcuggacuccggccgcgggggcugggacugcaucaugacgagcuaccaguaccugaucauccagaacaccaccugggaggaccacugccaguucucccggcccagccccaucggguaccucggccugcugucccagcggacccgcgacaucuacaucagccggcgccuccugggcacguucaccuggacccuguccgacagcgaggggaaggacaccccgggcggguacugccucacgcgguggaugcugaucgaggccgagcugaagugcuucggcaacaccgccgucgccaagugcaacgagaagcacgacgaggaguucugcgacaugcuccgccuguucgacuucaacaagcaggccauccagcggcugaaggcggaggcccagaugagcauccagcucaucaacaaggccgugaacgcccugaucaacgaccagcugaucaugaagaaccaccuccgcgacaucauggggauccccuacugcaacuacuccaaguacugguaccugaaccacaccgugaccggcaagacgagccugcccaagugcuggcucgucuccaacggcagcuaccugaacgagacccacuucuccgacgacaucgagcagcaggccgacaacaugaucaccgagaugcugcagaaggaguacauggagcggcaggggaagacgccccugggccucguggaccuguucguguucagcaccuccuucuaccugaucagcaucuuccuccaccuggucaagaucccgugaggacuaguuauaagacugacuagcccgaugggccucccaacgggcccuccuccccuccuugcaccgagauuaaucaaaggcucuuuucagagccaccaaaaaaaaaaaaaaaaaaaaaaaaaaaaaaaaaaaaaaaaaaaaaaaaaaaaaaaaaaaaaaaaagaauu

SEQ ID NO: 42980 - RNA, 1544 nt, Artificial Sequence
  mRNA product Design i-3 (hSL-A64-N5) comprising derived and/or modified sequence from LASV(Z0947-SLE-2011;Clade IV)__AIT17840__GPCmut13 (opt1)
aggagaaagcuuaccaugggccagaucgugaccuucuuccaggaggucccccacgugaucgaggaggugaugaacaucguccugaucgcccucagcauccuggccgugcugaaggggcucuacaacuucgcgaccugcggccugguggggcuggucacguuccuccugcugugcggccgcuccugcaccaucagccucuacaaggggguguacgagcugcagacccuggagcucaacauggagacccugaacaugacgaugccgcuguccugcaccaagaacaacagccaccacuacaucauggugggcaacgagaccggccucgagcugacccugacgaacaccuccaucaucaaccacaaguucugcaaccucagcgacgcccacaagaagaaccuguacgaccacgcccugauguccaucaucagcaccuuccaccucuccauccccaacuucaaccaguacgaggccaugagcugcgacuucaacgggggcaagaucuccguccaguacaaccugagccacuccuacgccggggacgcggccaaccacugcggcaccguggccaacggggugcugcagacguucaugcggauggccuggggcggcagcuacaucgcgcucgacuccgggcgcgaccggugggacugcaucaugaccagcuaccaguaccugaucauccagaacaccaccugggaggaccacugccaguucucccgccccagccccaucggcuaccuggggcuccugucccagcggacgcgcgacaucuacaucagccggcgccugcucggcaccuucaccuggacccugagcgacuccgagggcaaggacacgcccgggggcuacugccugacccgguggaugcucaucgaggccgagcugaagugcuucgggaacaccgccgucgccaagugcaacgagaagcacgacgaggaguucugcgacaugcugcgccucuucgacuucaacaagcaggccauccagcggcugaaggcggaggcccagaugagcauccagcugaucaacaaggccgugaacgcccucaucaacgaccagcugaucaugaagaaccaccuccgcgacaucaugggcauccccuacugcaacuacuccaaguacugguaccugaaccacaccacgaccgggaagaccagccugcccaagugcuggcugguguccaacggcagcuaccucaacgagacccacuucuccgacgacaucgagcagcaggccgacaacaugaucacggagaugcugcagaaggaguacauggagcggcagggcaagaccccgcuggggcuggucgaccucuucguguucagcaccuccuucuaccugaucagcaucuuccugcaccucgugaagaucccgugaggacuaguuauaagacugacuagcccgaugggccucccaacgggcccuccuccccuccuugcaccgagauuaaucaaaggcucuuuucagagccaccaaaaaaaaaaaaaaaaaaaaaaaaaaaaaaaaaaaaaaaaaaaaaaaaaaaaaaaaaaaaaaaaagaauu

SEQ ID NO: 42981 - RNA, 1544 nt, Artificial Sequence
  mRNA product Design i-3 (hSL-A64-N5) comprising derived and/or modified sequence from LASV(Josiah;Clade IV)__NP_694870__GPCmut13 (opt4)
aggagaaagcuuaccaugggccagaucgugaccuucuuccaggaggugccccacgugaucgaggaggugaugaacaucgugcugaucgcccugagcgugcuggccgugcugaagggccuguacaacuucgccaccugcggccuggugggccuggugaccuuccugcugcugugcggcagaagcugcaccaccagccuguacaagggcguguacgagcugcagacccuggagcugaacauggagacccugaacaugaccaugccccugagcugcaccaagaacaacagccaccacuacaucauggugggcaacgagaccggccuggagcugacccugaccaacaccagcaucaucaaccacaaguucugcaaccugagcgacgcccacaagaagaaccuguacgaccacgcccugaugagcaucaucagcaccuuccaccugagcauccccaacuucaaccaguacgaggccaugagcugcgacuucaacggcggcaagaucagcgugcaguacaaccugagccacagcuacgccggcgacgccgccaaccacugcggcaccguggccaacggcgugcugcagaccuucaugagaauggccuggggcggcagcuacaucgcccuggacagcggcagaggcaacugggacugcaucaugaccagcuaccaguaccugaucauccagaacaccaccugggaggaccacugccaguucagcagacccagccccaucggcuaccugggccugcugagccagagaaccagagacaucuacaucagcagaagacugcugggcaccuucaccuggacccugagcgacagcgagggcaaggacacccccggcggcuacugccugaccagauggaugcugaucgaggccgagcugaagugcuucggcaacaccgccguggccaagugcaacgagaagcacgacgaggaguucugcgacaugcugagacuguucgacuucaacaagcaggccauccagagacugaaggccgaggcccagaugagcauccagcugaucaacaaggccgugaacgcccugaucaacgaccagcugaucaugaagaaccaccugagagacaucaugggcauccccuacugcaacuacagcaaguacugguaccugaaccacaccaccaccggcagaaccagccugcccaagugcuggcuggugagcaacggcagcuaccugaacgagacccacuucagcgacgacaucgagcagcaggccgacaacaugaucaccgagaugcugcagaaggaguacauggagagacagggcaagaccccccugggccugguggaccuguucguguucagcaccagcuucuaccugaucagcaucuuccugcaccuggugaagauccccugaggacuaguuauaagacugacuagcccgaugggccucccaacgggcccuccuccccuccuugcaccgagauuaaucaaaggcucuuuucagagccaccaaaaaaaaaaaaaaaaaaaaaaaaaaaaaaaaaaaaaaaaaaaaaaaaaaaaaaaaaaaaaaaaagaauu

SEQ ID NO: 42982 - RNA, 1541 nt, Artificial Sequence
  mRNA product Design i-3 (hSL-A64-N5) comprising derived and/or modified sequence from LASV(LP;Clade I)__AAF86701__GPCmut13 (opt4)
aggagaaagcuuaccaugggccagaucaucaccuucuuccaggaggugccccacgugaucgaggaggugaugaacaucgugcugaucgcccugagccugcuggccauccugaagggccuguacaacaucgccaccugcggcaucaucggccugguggccuuccuguuccugugcggcaagagcugcagccugacccugaagggcggcuacgagcugcagacccuggagcugaacauggagacccugaacaugaccaugccccugagcugcaccaagaacagcagccaccacuacaucagagugggcaacgagaccggccuggagcugacccugaccaacaccagcaucaucaaccacaaguucugcaaccugagcgacgcccacaagaagaaccuguacgaccacgcccugaugagcaucaucagcaccuuccaccugagcauccccaacuucaaccaguacgaggccaugagcugcgacuucaacggcggcaagaucagcgugcaguacaaccugagccacagcuacgccggcgacgccgccgagcacugcggcaccguggccaacggcgugcugcagaccuucaugagaauggccuggggcggcagauacaucgcccuggacagcggcaagggcaacugggacugcaucaugaccagcuaccaguaccugaucauccagaacaccaccugggaggaccacugccaguucagcagacccagccccaucggcuaccugggccugcugagccagagaaccagagacaucuacaucagcagaagacugcugggcaccuucaccuggacccugagcgacagcgagggcaacgagacccccggcggcuacugccugaccagauggaugcugaucgaggccgagcugaagugcuucggcaacaccgccguggccaagugcaacgagaagcacgacgaggaguucugcgacaugcugagacuguucgacuucaacaagcaggccaucagaagacugaaggccgaggcccagaugagcauccagcugaucaacaaggccgugaacgcccugaucaacgaccagcugaucaugaagaaccaccugagagacaucaugggcauccccuacugcaacuacagcaaguacugguaccugaaccacaccagcagcggcagaaccagccugcccaagugcuggcugaucagcaacggcagcuaccugaacgagacccaguucagcgacgacaucgagcagcaggccgacaacaugaucaccgagaugcugcagaaggaguacaucgagagacagggcaagaccccccugggccugguggacaucuucaucuucagcaccagcuucuaccugaucagcaucuuccugcaccugaucaagauccccugaggacuaguuauaagacugacuagcccgaugggccucccaacgggcccuccuccccuccuugcaccgagauuaaucaaaggcucuuuucagagccaccaaaaaaaaaaaaaaaaaaaaaaaaaaaaaaaaaaaaaaaaaaaaaaaaaaaaaaaaaaaaaaaaagaauu

SEQ ID NO: 42983 - RNA, 1541 nt, Artificial Sequence
  mRNA product Design i-3 (hSL-A64-N5) comprising derived and/or modified sequence from LASV(803213;Clade II)__AAF86703__GPCmut13 (opt4)
aggagaaagcuuaccaugggccagaucaucaccuucuuccaggaggugccccacgugaucgaggaggugaugaacaucgugcugaucgcccugagccugcuggccauccugaagggcaucuacaacguggccaccugcggccuguucggccugaucagcuuccugcugcugugcggcagaagcugcagcgugaccuacaagggcguguacgagcugcagacccuggagcugaacauggccaaccugaacaugaccaugccccugagcugcaccaagaacaacagccaccacuacaucauggugggcaacgagaccggccuggagcugacccugaccaacaccagcaucaucaaccacaaguucugcaaccugagcgacgcccacaagaagaaccuguacgaccacgcccugaugagcaucaucagcaccuuccaccugagcauccccaacuucaaccaguacgaggccaugagcugcgacuucaacggcggcaagaucagcgugcaguacaaccugagccacagcuucgccguggacgccgccaaccacugcggcaccaucgccaacggcgugcugcagaccuucaugagaauggccuggggcggcagcuacaucgcccuggacagcggcaagggcaacugggacugcaucaugaccagcuaccaguaccugaucauccagaacaccaccugggaggaccacugccaguucagcagacccagccccaucggcuaccugggccugcugagccagagaaccagagacaucuacaucagcagaagacugcugggcaccuucaccuggacccugagcgacagcgagggcaacgaggcccccggcggcuacugccugaccagauggaugcugaucgaggccgagcugaagugcuucggcaacaccgccguggccaagugcaacgagaagcacgacgaggaguucugcgacaugcugagacuguucgacuucaacaagcaggccaucaagagacugaagaccgaggcccagaugagcauccagcugaucaacaaggccgugaacgcccugaucaacgaccagcugaucaugaagaaccaccugagagacaucaugggcauccccuacugcaacuacagcagauacugguaccugaaccacaccgugaccggcaagaccagccugcccagaugcuggcuggugagcaacggcagcuaccugaacgagacccacuucagcgacgacaucgagcagcaggccgacaacaugaucaccgagaugcugcagaaggaguacauggacagacagggcaagaccccccugggccugguggaccuguucguguucagcaccagcuucuaccugaucagcaucuuccugcaccuggugaagauccccugaggacuaguuauaagacugacuagcccgaugggccucccaacgggcccuccuccccuccuugcaccgagauuaaucaaaggcucuuuucagagccaccaaaaaaaaaaaaaaaaaaaaaaaaaaaaaaaaaaaaaaaaaaaaaaaaaaaaaaaaaaaaaaaaagaauu

SEQ ID NO: 42984 - RNA, 1541 nt, Artificial Sequence
  mRNA product Design i-3 (hSL-A64-N5) comprising derived and/or modified sequence from LASV(GA391;Clade III)__CAA36645__GPCmut13 (opt4)
aggagaaagcuuaccaugggccagaucgugaccuucuuccaggaggugccccacgugaucgaggaggugaugaacaucgugcugaucgcccugagcauccuggccauccugaagggccuguacaacguggccaccugcggccugaucggccuggugaccuuccugcugcugagcggcagaagcugcagccugaucuacaagggcaccuacgagcugcagacccuggagcugaacauggagacccugaacaugaccaugccccugagcugcaccaagaacaacagccaccacuacaucagagugggcaacgagaccggccuggagcugacccugaccaacaccagcauccugaaccacaaguucugcaaccugagcgacgcccacaagagaaaccuguacgaccacagccugaugagcaucaucagcaccuuccaccugagcauccccaacuucaaccaguacgaggccaugagcugcgacuucaacggcggcaagaucaccgugcaguacaaccugagccacagcuucgccguggacgccgccggccacugcggcacccuggccaacggcgugcugcagaccuucaugagaauggccuggggcggcagcuacaucgcccuggacagcggcagaggcaacugggacugcaucaugaccagcuaccaguaccugaucauccagaacaccaccugggacgaccacugccaguucagcagacccagccccaucggcuaccugggccugcugagccagagaaccagagacaucuacaucagcagaagacugcugggcaccuucaccuggacccugagcgacagcgagggcaacgagacccccggcggcuacugccugaccagauggaugcugaucgaggccgagcugaagugcuucggcaacaccgccguggccaagugcaacgagaagcacgacgaggaguucugcgacaugcugagacuguucgacuucaacaagcaggccaucagaagacugaagaccgaggcccagaugagcauccagcugaucaacaaggccgugaacgcccugaucaacgaccagcugaucaugaagaaccaccugagagacaucaugggcauccccuacugcaacuacagcagauacugguaccugaaccacaccagcaccggcaagaccagccugcccagaugcuggcugaucagcaacggcagcuaccugaacgagaccaaguucagcgacgacaucgagcagcaggccgacaacaugaucaccgagaugcugcagaaggaguacaucgacagacagggcaagaccccccugggccugguggaccuguucguguucagcaccagcuucuaccugaucagcaucuuccugcaccuggugaagauccccugaggacuaguuauaagacugacuagcccgaugggccucccaacgggcccuccuccccuccuugcaccgagauuaaucaaaggcucuuuucagagccaccaaaaaaaaaaaaaaaaaaaaaaaaaaaaaaaaaaaaaaaaaaaaaaaaaaaaaaaaaaaaaaaaagaauu

SEQ ID NO: 42985 - RNA, 1544 nt, Artificial Sequence
  mRNA product Design i-3 (hSL-A64-N5) comprising derived and/or modified sequence from LASV(AV;Clade V)__CCA30314__GPCmut13 (opt4)
aggagaaagcuuaccaugggccagaucgugaccuucuuccaggaggugccccacgugaucgaggaggugaugaacaucgugcugaucgcccugagcauccuggccgugcugaagggccuguacaacaucgccaccugcggccugaucggccugaucaccuuccugcugcugugcggcagaagcugcagcagcaaccuguacaagggcguguacgagcugcagagccuggaccugaacauggagacccugaacaugaccaugccccugagcugcaccaagaacaacagccaccacuacaucagagugggcaacgacaccggccuggagcugacccugaccaacaccagcauccugaaccacaaguucugcaaccugagcgacgcccacaagaaggaccuguacgaccacgcccugaugagcaucaucagcaccuuccaccugagcauccccaacuucaaccaguacgaggccaugagcugcgacuucaacggcggcaagaucagcgugcaguacaaccugagccacagcuacgccaucgacgccgccaaccacugcggcaccguggccaacggcauccugcagaccuucaugagaauggccuggggcggcagcuacaucgcccuggacagcggcagaggcaacugggacugcaucaugaccagcuaccaguaccugaucauccagaacaccaccugggagaaccacugccaguucagcagacccagccccaucggcuaccugggccugcugagccagagaaccagagacaucuacaucagcagaagacugcugggcaccuucaccuggacccugagcgacagcgagggcaacgccacccccggcggcuacugccugaccagauggaugcugaucgaggccgagcugaagugcuucggcaacaccgccguggccaagugcaacgagaagcacgacgaggaguucugcgacaugcugagacuguucgacuucaacaagcaggccaucagcagacugaagagcgaggcccagaugagcauccagcugaucaacaaggccgugaacgcccugaucaacgaccagcugaucaugaagaaccaccugagagacaucaugggcauccccuacugcaacuacagcaaguacugguaccugaaccacaccaucaccggcaagaccagccugcccaagugcuggcuggugagcaacggcagcuaccugaacgagacccacuucagcgacgacaucgagcagcaggccgacaacaugaucaccgagaugcugcagaaggaguacauggagagacagggcaagaccccccugggccugguggaccuguucguguucagcaccagcuucuaccugaucagcaucuuccugagacuggugaagauccccugaggacuaguuauaagacugacuagcccgaugggccucccaacgggcccuccuccccuccuugcaccgagauuaaucaaaggcucuuuucagagccaccaaaaaaaaaaaaaaaaaaaaaaaaaaaaaaaaaaaaaaaaaaaaaaaaaaaaaaaaaaaaaaaaagaauu

SEQ ID NO: 42986 - RNA, 1541 nt, Artificial Sequence
  mRNA product Design i-3 (hSL-A64-N5) comprising derived and/or modified sequence from LASV(Togo/2016/7082;Clade VI)__AMR44577__GPCmut13 (opt4)
aggagaaagcuuaccaugggccagaucaucaccuucuuccaggaggugccccacgugaucgaggaggugaugaacaucgugcugaucgcccugagccugcuggccauccugaagggcguguacaacguggccaccugcggcaucaucggccuggugaccuuccuguuccugugcggcagaagcugcagccugaucuacaagggcagcuacgagcugcagacccuggagcugaacauggagacccugaacaugaccaugccccugagcugcaccaagaacagcagccaccacuacaucagagugggcaacgagaccggccuggagcugacccugaccaacaccagcaucaucaaccacaaguucugcaaccugagcgacgcccacaagagaaaccuguacgaccacgcccugaugagcauccugagcaccuuccaccugagcauccccaacuucaaccaguacgaggccaugagcugcgacuucaacggcggcaagaucagcgugcaguacaaccugagccacgccuacgccguggacgccgccgagcacugcggcaccguggccaacggcgugcugcagaccuucaugagaauggccuggggcggcagcuacaucgcccuggacagcggcagaggcaacugggacugcaucaugaccagcuaccaguaccugaucauccagaacaccaccugggaggaccacugccaguucagcagacccagccccaucggcuaccugggccugcugagccagagaaccagagacaucuacaucagcagaagacugcugggcaccuucaccuggacccugagcgacagcgagggcaacgagacccccggcggcuacugccugaccagauggaugcugaucgaggccgagcugaagugcuucggcaacaccgccguggccaagugcaacgagaagcacgacgaggaguucugcgacaugcugagacuguucgacuucaacaagcaggccauccagagacugaagagcgaggcccagaugagcauccagcugaucaacaaggccgugaacgcccugaucaacgaccagcugaucaugaagaaccaccugagagacaugaugggcauccccuacugcaacuacagcaaguacugguaccugaaccacaccagcagcggcagaaccagccugcccaagugcuggcuggugagcaacggcagcuaccugaacgagacccacuucagcgacgacaucgagcagcaggccgacaacaugaucaccgagaugcugcagaaggaguacaucgacagacagggcaagaccccccugggccugguggaccuguucguguucagcaccagcuucuaccugaucagcaucuuccugcaccugaucaagauccccugaggacuaguuauaagacugacuagcccgaugggccucccaacgggcccuccuccccuccuugcaccgagauuaaucaaaggcucuuuucagagccaccaaaaaaaaaaaaaaaaaaaaaaaaaaaaaaaaaaaaaaaaaaaaaaaaaaaaaaaaaaaaaaaaagaauu

SEQ ID NO: 42987 - RNA, 1541 nt, Artificial Sequence
  mRNA product Design i-3 (hSL-A64-N5) comprising derived and/or modified sequence from LASV(KAK-428;Clade n.d. (VII))__ANH09740__GPCmut13 (opt4)
aggagaaagcuuaccaugggccagaucgugaccuucuuccaggaggugccccacgugaucgaggaggugaugaacaucgugcugaucgcccugagccugcuggccauccugaagggccuguacaacuucgccaccugcggcgugaucggccugaucaccuuccugcugcugugcggcagaagcugcagcgccaccuacaagggccaguacgagcugcagacccuggagcugaacauggagagccugaacaugaccaugccccugagcugcaccaagaacaacagccaccacuacaucagagccggcaacaacaccggccuggagcugacccugaccaacaccagcaucaucagccacaaguucugcaaccugagcgacgcccacaagaagaaccuguacgaccacacccugaugagcaucaucaccaccuuccaccugagcauccccaacuucaaccaguacgaggccaugagcugcgacuucaacggcggcaagaucagcauccaguacaaccugagccacagcuacgccggcgacgccgcccagcacugcggcaccguggccaacggcgugcugcagaccuucaugagaauggccuggggcggcagcuaccuggcccuggacagcggcagaagaggcugggacugcaucaucagcagcuaccaguaccugaucauccagaacaccaccugggacgaccacugccaguucagcagacccagccccaucggcuaccugggcuucgugagccagaagaccagagacaucuacaucagcagaagacugcugggcaccuucaccuggacccugagcgacagcgagggccacgacaugcccggcggcuacugccugaccagauggaugcugaucgaggccgaccugaagugcuucggcaacaccgccguggccaagugcaacgagaagcacgacgaggaguucugcgacauguggagacuguucgacuucaacaagcaggccauccagagacugaaggccgaggcccagaugaacauccagcugaucaacaaggccgugaacgcccugaucaacgaccagcugaugaugaagaaccaccugagagacaucaugggcauccccuacugcaacuacagcaaguucugguaccugaacaacaccaccaccggcagaaccagccugcccagaugcuggcugaucagcaacggcagcuaccugaacgagacccacuucagcgacgacaucgagcagcaggccgacaacaugaucaccgagaugcugcagaaggaguacauggacagacagggcaagaccccccugggccugguggaccuguucguguucagcaccagcuucuaccugaucaccaucuuccugcaccuggugaagauccccugaggacuaguuauaagacugacuagcccgaugggccucccaacgggcccuccuccccuccuugcaccgagauuaaucaaaggcucuuuucagagccaccaaaaaaaaaaaaaaaaaaaaaaaaaaaaaaaaaaaaaaaaaaaaaaaaaaaaaaaaaaaaaaaaagaauu

SEQ ID NO: 42988 - RNA, 1541 nt, Artificial Sequence; identical to SEQ ID NO: 42982
  mRNA product Design i-3 (hSL-A64-N5) comprising derived and/or modified sequence from LASV(Pinneo-NIG-1969;Clade I)__AIT17836__GPCmut13 (opt4)

SEQ ID NO: 42989 - RNA, 1541 nt, Artificial Sequence
  mRNA product Design i-3 (hSL-A64-N5) comprising derived and/or modified sequence from LASV(ISTH0009-NIG-2011;Clade II)__AIT17404__GPCmut13 (opt4)
aggagaaagcuuaccaugggccagaucaucaccuucuuccaggaggugccccacgugaucgaggaggugaugaacaucgugcugaucgcccugagccugcuggccauccugaagggcaucuacaacguggccaccugcggccuguucggccuggugagcuuccugcugcugugcggcagaagcugcagcaccaccuacaagggcguguacgagcugcagacccuggagcuggacauggccagccugaacaugaccaugccccugagcugcaccaagaacaacagccaccacuacaucauggugggcaacgagaccggccuggagcugacccugaccaacaccagcaucaucaaccacaaguucugcaaccugagcgacgcccacaagaagaaccuguacgaccacgcccugaugagcaucaucagcaccuuccaccugagcauccccaacuucaaccaguacgaggccaugagcugcgacuucaacggcggcaagaucagcgugcaguacaaccugagccacgccuacgccguggacgccgccaaccacugcggcaccaucgccaacggcgugcugcagaccuucaugagaauggccuggggcggcagcuacaucgcccuggacagcggcaagggcagcugggacugcaucaugaccagcuaccaguaccugaucauccagaacaccaccugggaggaccacugccaguucagcagacccagccccaucggcuaccugggccugcugagccagagaaccagagacaucuacaucagcagaagacugcugggcaccuucaccuggacccugagcgacagcgagggcaacgagacccccggcggcuacugccugaccagauggaugcugaucgaggccgagcugaagugcuucggcaacaccgccguggccaagugcaacgagaagcacgacgaggaguucugcgacaugcugagacuguucgacuucaacaagcaggccaucagaagacugaagaccgaggcccagaugagcauccagcugaucaacaaggccgugaacgcccugaucaacgaccagcugaucaugaagaaccaccugagagacaucaugggcauccccuacugcaacuacagcaaguacugguaccugaaccacaccgugaccggcaagaccagccugcccagaugcuggcuggugagcaacggcagcuaccugaacgagacccacuucagcgacgacaucgagcagcaggccgacaacaugaucaccgagcugcugcagaaggaguacauggacagacagggcaagaccccccugggccugguggaccuguucguguucagcaccagcuucuaccugaucagcaucuuccugcaccugaucaagauccccugaggacuaguuauaagacugacuagcccgaugggccucccaacgggcccuccuccccuccuugcaccgagauuaaucaaaggcucuuuucagagccaccaaaaaaaaaaaaaaaaaaaaaaaaaaaaaaaaaaaaaaaaaaaaaaaaaaaaaaaaaaaaaaaaagaauu

SEQ ID NO: 42990 - RNA, 1541 nt, Artificial Sequence
  mRNA product Design i-3 (hSL-A64-N5) comprising derived and/or modified sequence from LASV(ISTH2010-NIG-2012;Clade II)__AIT17482__GPCmut13 (opt4)
aggagaaagcuuaccaugggccagaucaucaccuucuuccaggaggugccccacgugaucgaggaggugaugaacaucgugcugaucgcccugagccugcuggccauccugaagggcaucuacaacguggccaccugcggccuguucggccuggugagcuuccugcugcugugcggcagaagcugcagcaccaccuacaagggcguguacgagcugcagacccuggagcuggacauggccagccugaacaugaccaugccccugagcugcaccaagaacaacagccaccacuacaucauggugggcaacgagaccggccuggagcugacccugaccaacaccagcaucaucaaccacaaguucugcaaccugagcgacgcccacaagaagaaccuguacgaccacgcccugaugagcaucaucagcaccuuccaccugagcauccccaacuucaaccaguacgaggccaugagcugcgacuucaacggcggcaagaucagcgugcaguacaaccugagccacgccuacgccguggacgccgccaaccacugcggcaccaucgccaacggcgugcugcagaccuucaugagaauggccuggggcggcagcuacaucgcccuggacagcggcaagggcagcugggacugcaucaugaccagcuaccaguaccugaucauccagaacaucaccugggaggaccacugccaguucagcagacccagccccaucggcuaccugggccugcugagccagagaaccagagacaucuacaucagcagaagacugcugggcaccuucaccuggacccugagcgacagcgagggcaacgagacccccggcggcuacugccugaccagauggaugcugaucgaggccgagcugaagugcuucggcaacaccgccguggccaagugcaacgagaagcacgacgaggaguucugcgacaugcugagacuguucgacuucaacaagcaggccaucagaagacugaagaccgaggcccagaugagcauccagcugaucaacaaggccgugaacgcccugaucaacgaccagcugaucaugaagaaccaccugagagacaucaugggcauccccuacugcaacuacagcaaguacugguaccugaaccacaccgugaccggcaagaccagccugcccagaugcuggcuggugagcaacggcagcuaccugaacgagacccacuucagcgacgacaucgagcagcaggccgacaacaugaucaccgagcugcugcagaaggaguacaucgacagacagggcaagaccccccugggccugguggaccuguucguguucagcaccagcuucuaccugaucagcaucuuccugcaccuggugaagauccccugaggacuaguuauaagacugacuagcccgaugggccucccaacgggcccuccuccccuccuugcaccgagauuaaucaaaggcucuuuucagagccaccaaaaaaaaaaaaaaaaaaaaaaaaaaaaaaaaaaaaaaaaaaaaaaaaaaaaaaaaaaaaaaaaagaauu

SEQ ID NO: 42991 - RNA, 1541 nt, Artificial Sequence
  mRNA product Design i-3 (hSL-A64-N5) comprising derived and/or modified sequence from LASV(Lassa virus/H.sapiens-wt/NGA/2015/ISTH_0543;Clade II)__AVO03639__GPCmut13 (opt4)
aggagaaagcuuaccaugggccagaucaucaccuucuuccaggaggugccccacgugaucgaggaggugaugaacaucgugcugaucgcccugagccugcuggccauccugaagggcaucuacaacguggccaccugcggccuguucggccuggugagcuuccugcugcugugcggcagaagcugcagcaccaccuacaagggcguguacgagcugcagacccuggagcuggacauggccaaccugaacaugaccaugccccugagcugcaccaagaacaacagccaccacuacaucauggugggcaacgagaccggccuggagcugacccugaccaacaccagcaucaucaaccacaaguucugcaaccugagcgacgcccacaagaagaaccuguacgaccacgcccugaugagcaucaucagcaccuuccaccugagcauccccaacuucaaccaguacgaggccaugagcugcgacuucaacggcggcaagaucagcgugcaguacaaccugagccacaccuacgccguggacgccgccaaccacugcggcaccaucgccaacggcgugcugcagaccuucaugagaauggccuggggcggcagcuacaucgcccuggacagcggcaagggcagcugggacugcaucaugaccagcuaccaguaccuggugauccagaacaccaccugggaggaccacugccaguucagcagacccagccccaucggcuaccugggccugcugagccagagaaccagagacaucuacaucagcagaagacugcugggcaccuucaccuggacccugagcgacagcgagggcaacgagacccccggcggcuacugccugaccagauggaugcugaucgaggccgagcugaagugcuucggcaacaccgccguggccaagugcaacgagaagcacgacgaggaguucugcgacaugcugagacuguucgacuucaacaagcaggccaucagaagacugaagaccgaggcccagaugagcauccagcugaucaacaaggccgugaacgcccugaucaacgaccagcugaucaugaagaaccaccugagagacaucaugggcauccccuacugcaacuacagcaaguacugguaccugaaccacaccgugaccggcaagaccagccugcccagaugcuggcuggugagcaacggcagcuaccugaacgagacccacuucagcgacgacaucgagcagcaggccgacaacaugaucaccgagcugcugcagaaggaguacaucgacagacagggcaagaccccccugggccugguggaccuguucguguucagcaccagcuucuaccugaucagcaucuuccugcaccuggugaagauccccugaggacuaguuauaagacugacuagcccgaugggccucccaacgggcccuccuccccuccuugcaccgagauuaaucaaaggcucuuuucagagccaccaaaaaaaaaaaaaaaaaaaaaaaaaaaaaaaaaaaaaaaaaaaaaaaaaaaaaaaaaaaaaaaaagaauu

SEQ ID NO: 42992 - RNA, 1541 nt, Artificial Sequence
  mRNA product Design i-3 (hSL-A64-N5) comprising derived and/or modified sequence from LASV(Lassa virus/H.sapiens-wt/NGA/2016/ISTH_0009;Clade II)__AVO03571__GPCmut13 (opt4)
aggagaaagcuuaccaugggccagaucaucaccuucuuccaggaggugccccacgugaucgaggaggugaugaacaucgugcugaucgcccugagccugcuggccauccugaagggcaucuacaacguggccaccugcggccugcugggccuggugagcuuccugcugcugugcggcagaagcugcagcaccaccuacaagggcguguacgagcugcagacccuggagcuggacauggccagccugaacaugaccaugccccugagcugcaccaagaacaacagccaccacuacaucauggugggcaacgagaccggccuggagcugacccugaccaacaccagcaucaucaaccacaaguucugcaaccugagcgacgcccacaagaagaaccuguacgaccacgcccugaugagcaucaucagcaccuuccaccugagcauccccaacuucaaccaguacgaggccaugagcugcgacuucaacggcggcagaaucagcgugcaguacaaccugagccacagcuacgccguggacgccgccaaccacugcggcaccaucgccaacggcgugcugcagaccuucaugagaauggccuggggcggcagcuacaucgcccuggacagcggcaagggcagcugggacugcaucaugaccagcuaccaguaccugaucauccagaacaccaccugggaggaccacugccaguucagcagacccagccccaucggcuaccugggccugcugagccagagaaccagagacaucuacaucagcagaagacugcugggcaccuucaccuggacccugagcgacagcgagggcaacgagacccccggcggcuacugccugaccagauggaugcugaucgaggccgagcugaagugcuucggcaacaccgccguggccaagugcaacgagaagcacgacgaggaguucugcgacaugcugagacuguucgacuucaacaagcaggccaucagaagacugaagaccgaggcccagaugagcauccagcugaucaacaaggccgugaacgcccugaucaacgaccagcugaucaugaagaaccaccugagagacaucaugggcauccccuacugcaacuacagcaaguacugguaccugaaccacaccgugaccggcaagaccagccugcccagaugcuggcuggugagcaacggcagcuaccugaacgagacccacuucagcgacgacaucgagcagcaggccgacaacaugaucaccgagcugcugcagaaggaguacaucgacagacagggcaagaccccccugggccugguggaccuguucguguucagcaccagcuucuaccugaucagcaucuuccugcaccuggugaagauccccugaggacuaguuauaagacugacuagcccgaugggccucccaacgggcccuccuccccuccuugcaccgagauuaaucaaaggcucuuuucagagccaccaaaaaaaaaaaaaaaaaaaaaaaaaaaaaaaaaaaaaaaaaaaaaaaaaaaaaaaaaaaaaaaaagaauu

SEQ ID NO: 42993 - RNA, 1541 nt, Artificial Sequence
  mRNA product Design i-3 (hSL-A64-N5) comprising derived and/or modified sequence from LASV(Lassa virus/H.sapiens-wt/NGA/2016/ISTH_0017;Clade II)__AVO03567__GPCmut13 (opt4)
aggagaaagcuuaccaugggccagaucaucaccuucuuccaggaggugccccacgugaucgaggaggugaugaacaucgugcugaucgcccugagccugcuggccauccugaagggcaucuacaacguggccaccugcggccuguucggccuggugagcuuccugcugcugugcggcagaagcugcagcaccaccuacaagggcguguacgagcugcagacccuggagcuggacauggccagccugaacaugaccaugccccugagcugcaccaagaacaacagccaccacuacaucauggugggcaacgagaccggccuggagcugacccugaccaacaccagcaucaucaaccacaaguucugcaaccugagcgacgcccacaagaagaaccuguacgaccacgcccugaugagcaucaucagcaccuuccaccugagcauccccaacuucaaccaguacgaggccaugagcugcgacuucaacggcggcaagaucagcgugcaguacaaccugagccacaccuacgccaucgacgccgccaaccacugcggcaccaucgccaacggcgugcugcagaccuucaugagaauggccuggggcggcagcuacaucgcccuggacagcggcaagggcagcugggacugcaucaugaccagcuaccaguaccugaucauccagaacaccaccugggaggaccacugccaguucagcagacccagccccaucggcuaccugggccugcugagccagagaaccagagacaucuacaucagcagaagacugcugggcaccuucaccuggacccugagcgacagcgagggcaacgagacccccggcggcuacugccugaccagauggaugcugaucgaggccgagcugaagugcuucggcaacaccgccguggccaagugcaacgagaagcacgacgaggaguucugcgacaugcugagacuguucgacuucaacaagcaggccaucagaagacugaagaccgaggcccagaugagcauccagcugaucaacaaggccgugaacgcccugaucaacgaccagcugaucaugaagaaccaccugagagacaucaugggcauccccuacugcaacuacagcaaguacugguaccugaaccacaccgugaccggcaagaccagccugcccagaugcuggcuggugagcaacggcagcuaccugaacgagacccacuucagcgacgacaucgagcagcaggccgacaacaugaucaccgagcugcugcagaaggaguacauggacagacagggcaagaccccccugggccugguggaccuguucguguucagcaccagcuucuaccugaucagcaucuuccugcaccuggugagaauccccugaggacuaguuauaagacugacuagcccgaugggccucccaacgggcccuccuccccuccuugcaccgagauuaaucaaaggcucuuuucagagccaccaaaaaaaaaaaaaaaaaaaaaaaaaaaaaaaaaaaaaaaaaaaaaaaaaaaaaaaaaaaaaaaaagaauu

SEQ ID NO: 42994 - RNA, 1541 nt, Artificial Sequence
  mRNA product Design i-3 (hSL-A64-N5) comprising derived and/or modified sequence from LASV(Lassa virus/H.sapiens-wt/NGA/2018/ISTH_0959;Clade II)__AVV65099__GPCmut13 (opt4)
aggagaaagcuuaccaugggccagaucaucaccuucuuccaggaggugccccacgugaucgaggaggugaugaacaucgugcugaucgcccugagccugcuggccauccugaagggcaucuacaacguggugaccugcggccuguucggccuggugagcuuccugcugcugugcggcagaagcugcagcaccaccuacaagggcguguacgagcugcagacccuggagcuggacauggccagccugaacaugaccaugccccugagcugcaccaagaacaacagccaccacuacaucauggugggcaacgagaccggccuggagcugacccugaccaacaccagcaucaucaaccacaaguucugcaaccugagcgacgcccacaagaagaaccuguacgaccacgcccugaugagcaucaucagcaccuuccaccugagcauccccaacuucaaccaguacgaggccaugagcugcgacuucaacggcggcaagaucagcgugcaguacaaccugagccacgccuacgccaucgacgccgccaaccacugcggcaccaucgccaacggcgugcugcagaccuucaugagaauggccuggggcggcagcuacaucgcccuggacagcggcaagggcagcugggacugcaucaugaccagcuaccaguaccugaucauccagaacaccaccugggaggaccacugccaguucagcagacccagccccaucggcuaccugggccugcugagccagagaaccagagacaucuacaucagcagaagacugcugggcaccuucaccuggacccugagcgacagcgagggcaacgagacccccggcggcuacugccugaccagauggaugcugaucgaggccgagcugaagugcuucggcaacaccgccguggccaagugcaacgagaagcacgacgaggaguucugcgacaugcugagacuguucgacuucaacaagcaggccaucagaagacugaagaccgaggcccagaugagcauccagcugaucaacaaggccgugaacgcccugaucaacgaccagcugaucaugaagaaccaccugagagacaucaugggcauccccuacugcaacuacagcaaguacugguaccugaaccacaccgugaccggcaagaccagccugcccagaugcuggcuggugagcaacggcagcuaccugaacgagacccacuucagcgacgacaucgagcagcaggccgacaacaugaucaccgagcugcugcagaaggaguacaucgacagacagggcaagaccccccugggccugguggaccuguucguguucagcaccagcuucuaccugaucagcaucuuccugcaccuggugaagauccccugaggacuaguuauaagacugacuagcccgaugggccucccaacgggcccuccuccccuccuugcaccgagauuaaucaaaggcucuuuucagagccaccaaaaaaaaaaaaaaaaaaaaaaaaaaaaaaaaaaaaaaaaaaaaaaaaaaaaaaaaaaaaaaaaagaauu

SEQ ID NO: 42995 - RNA, 1541 nt, Artificial Sequence
  mRNA product Design i-3 (hSL-A64-N5) comprising derived and/or modified sequence from LASV(LASV003-NIG-2008;Clade II)__AIT17580__GPCmut13 (opt4)
aggagaaagcuuaccaugggccagaucaucaccuucuuccaggaggugccccacgugaucgaggaggugaugaacaucgugcugaucgcccugagccugcuggccauccugaagggcaucuacaacguggccaccugcggccuguucggccuggugagcuuccugcugcugugcggcagaagcugcagcaccaccuacaagggcguguacgagcugcagacccuggagcuggacauggccagccugaacaugaccaugccccugagcugcaccaagaacaacagccaccacuacaucauggugggcaacgagaccggccuggagcugacccugaccaacaccagcaucaucaaccacaaguucugcaaccugagcgacgcccacaagaagaaccuguacgaccacgcccugaugagcaucaucagcaccuuccaccugagcauccccaacuucaaccaguacgaggccaugagcugcgacuucaacggcggcaagaucagcgugcaguacaaccugagccacaccuacgccguggacgccgccaaccacugcggcaccaucgccaacggcgugcugcagaccuucaugagaauggccuggggcggcagcuacaucgcccuggacagcggcaagggcagcugggacugcaucaugaccagcuaccaguaccugaucauccagaacaccaccugggaggaccacugccaguucagcagacccagccccaucggcuaccugggccugcugagccagagaaccagagacaucuacaucagcagaagacugcugggcaccuucaccuggacccugagcgacagcgagagcaacgagacccccggcggcuacugccugaccagauggaugcugaucgaggccgagcugaagugcuucggcaacaccgccguggccaagugcaacgagaagcacgacgaggaguucugcgacaugcugagacuguucgacuucaacaagcaggccaucagaagacugaaggccgaggcccagaugagcauccagcugaucaacaaggccgugaacgcccugaucaacgaccagcugaucaugaagaaccaccugagagacaucaugggcauccccuacugcaacuacagcaaguacugguaccugaaccacaccgugaccggcagaaccagccugcccagaugcuggcuggugagcaacggcagcuaccugaacgagacccacuucagcgacgacaucgagcagcaggccgacaacaugaucaccgagcugcugcagaaggaguacauggacagacagggcaagaccccccugggccugguggaccuguucguguucagcaccagcuucuaccugaucagcaucuuccugcaccuggugaagauccccugaggacuaguuauaagacugacuagcccgaugggccucccaacgggcccuccuccccuccuugcaccgagauuaaucaaaggcucuuuucagagccaccaaaaaaaaaaaaaaaaaaaaaaaaaaaaaaaaaaaaaaaaaaaaaaaaaaaaaaaaaaaaaaaaagaauu

SEQ ID NO: 42996 - RNA, 1541 nt, Artificial Sequence
  mRNA product Design i-3 (hSL-A64-N5) comprising derived and/or modified sequence from LASV(LASV035-NIG-2009;Clade II)__AIT17588__GPCmut13 (opt4)
aggagaaagcuuaccaugggccagaucaucaccuucuuccaggaggugccccacgugaucgaggaggugaugaacaucgugcugaucgcccugagccugcuggccauccugaagggcaucuacaacguggccaccugcggccuguucggccuggugagcuuccugcugcugugcggcagaagcugcagcaccaccuacaagggcguguacgagcugcagacccuggagcuggacauggccagccugaacaugaccaugccccugagcugcaccaagaacaacagccaccacuacaucauggugggcaacgagaccggccuggagcugacccugaccaacaccagcaucaucaaccacaaguucugcaaccugagcgacgcccacaagaagaaccuguacgaccacgcccugaugagcaucaucagcaccuuccaccugagcauccccaacuucaaccaguacgaggccaugagcugcgacuucaacggcggcaagaucagcgugcaguacaaccugagccacgccuacgccguggacgccgccaaccacugcggcaccaucgccaacggcgugcugcagaccuucaugagaauggccuggggcggcagcuacaucgcccuggacagcggcaagggcagcugggacugcaucaugaccagcuaccaguaccugaucauccagaacaccaccugggaggaccacugccaguucagcagacccagccccaucggcuaccugggccugcugagccagagaaccagagacaucuacaucagcagaagacugcugggcaccuucaccuggacccugagcgacagcgagggcaacgagacccccggcggcuacugccugaccagauggaugcugaucgaggccgagcugaagugcuucggcaacaccgccguggccaagugcaacgagaagcacgacgaggaguucugcgacaugcugagacuguucgacuucaacaagcaggccaucagaagacugaaggccgaggcccagaugagcauccagcugaucaacaaggccgugaacgcccugaucaacgaccagcugaucaugaagaaccaccugagagacaucaugggcauccccuacugcaacuacagcaaguacugguaccugaaccacaccgugaccggcaagaccagccugcccagaugcuggcuggugagcaacggcagcuaccugaacgagacccacuucagcgacgacaucgagcagcaggccgacaacaugaucaccgagcugcugcagaaggaguacaucgacagacagggcaagaccccccugggccugguggaccuguucguguucagcaccagcuucuaccugaucagcaucuuccugcaccuggugaagauccccugaggacuaguuauaagacugacuagcccgaugggccucccaacgggcccuccuccccuccuugcaccgagauuaaucaaaggcucuuuucagagccaccaaaaaaaaaaaaaaaaaaaaaaaaaaaaaaaaaaaaaaaaaaaaaaaaaaaaaaaaaaaaaaaaagaauu

SEQ ID NO: 42997 - RNA, 1541 nt, Artificial Sequence
  mRNA product Design i-3 (hSL-A64-N5) comprising derived and/or modified sequence from LASV(LASV1000-NIG-2009;Clade II)__AIT17782__GPCmut13 (opt4)
aggagaaagcuuaccaugggccagaucaucaccuucuuccaggaggugccccacgugaucgaggaggugaugaacaucgugcugaucgcccugagccugcuggccauccugaagggcaucuacaacguggccaccugcggccuguucggccuggugagcuuccugcugcugugcggcagaagcugcagcaccaccuacaagggcguguacgagcugcagacccuggagcuggacauggccagccugaacaugaccaugccccugagcugcaccaagaacaacagccaccacuacaucauggugggcaacgagaccggccuggagcugacccugaccaacaccagcaucaucaaccacaaguucugcaaccugagcgacgcccacaagaagaaccuguacgaccacgcccugaugagcaucaucagcaccuuccaccugagcauccccaacuucaaccaguacgaggccaugagcugcgacuucaacggcggcaagaucagcgugcaguacaaccugagccacaccuacgccguggacgccgccaaccacugcggcaccaucgccaacggcgugcugcagaccuucaugagaauggccuggggcggcagcuacaucgcccuggacagcggcaagggcagcugggacugcaucaugaccagcuaccaguaccugaucauccagaacaccaccugggaggaccacugccaguucagcagacccagccccaucggcuaccugggccugcugagccagagaaccagagacaucuacaucagcagaagacugcugggcaccuucaccuggacccugagcgacagcgagggcaacgagacccccggcggcuacugccugaccagauggaugcugaucgaggccgagcugaagugcuucggcaacaccgccguggccaagugcaacgagaagcacgacgaggaguucugcgacaugcugagacuguucgacuucaacaagcaggccaucaagagacugaagaccgaggcccagaugagcauccagcugaucaacaaggccgugaacgcccugaucaacgaccagcugaucaugaagaaccaccugagagacaucaugggcauccccuacugcaacuacagcaaguacugguaccugaaccacaccgugaccggcaagaccagccugcccagaugcuggcuggugagcaacggcagcuaccugaacgagacccacuucagcgacgacaucgagcagcaggccgacaacaugaucaccgagcugcugcagaaggaguacaucgacagacagggcaagaccccccugggccugguggaccuguucguguucagcaccagcuucuaccugaucagcaucuuccugcaccuggugaagauccccugaggacuaguuauaagacugacuagcccgaugggccucccaacgggcccuccuccccuccuugcaccgagauuaaucaaaggcucuuuucagagccaccaaaaaaaaaaaaaaaaaaaaaaaaaaaaaaaaaaaaaaaaaaaaaaaaaaaaaaaaaaaaaaaaagaauu

SEQ ID NO: 42998 - RNA, 1541 nt, Artificial Sequence
  mRNA product Design i-3 (hSL-A64-N5) comprising derived and/or modified sequence from LASV(LASV221-NIG-2010;Clade II)__AIT17624__GPCmut13 (opt4)
aggagaaagcuuaccaugggccagaucaucaccuucuuccaggaggugccccacgugaucgaggaggugaugaacaucgugcugaucgcccugagccugcuggccauccugaagggcaucuacaacguggccaccugcggccuguucggccuggugagcuuccugcugcugugcggcagaagcugcagcaccaccuacaagggcguguacgagcugcagacccuggagcuggacauggccagccugaacaugaccaugccccugagcugcaccaagaacaacagccaccacuacaucauggugggcaacgagaccggccuggagcugacccugaccaacaccagcaucaucaaccacaaguucugcaaccugagcgacgcccacaagaagaaccuguacgaccacgcccugaugagcaucaucagcaccuuccaccugagcauccccaacuucaaccaguacgaggccaugagcugcgacuucaacggcggcaagaucagcgugcaguacaaccugagccacaccuacgccaucgacgccgccaaccacugcggcaccaucgccaacggcgugcugcagaccuucaugagaauggccuggggcggcagcuacaucgcccuggacagcggcaagggcagcugggacugcaucaugaccagcuaccaguaccugaucauccagaacaccaccugggaggaccacugccaguucagcagacccagccccaucggcuaccugggccugcugagccagagaaccagagacaucuacaucagcagaagacugcugggcaccuucaccuggacccugagcgacagcgagggcaacgagacccccggcggcuacugccugaccagauggaugcugaucgaggccgagcugaagugcuucggcaacaccgccguggccaagugcaacgagaagcacgacgaggaguucugcgacaugcugagacuguucgacuucaacaagcaggccaucagaagacugaagaccgaggcccagaugagcauccagcugaucaacaaggccgugaacgcccugaucaacgaccagcugaucaugaagaaccaccugagagacaucaugggcauccccuacugcaacuacagcaaguacugguaccugaaccacaccgugaccggcaagaccagccugcccagaugcuggcuggugagcaacggcagcuaccugaacgagacccacuucagcgacgacaucgagcagcaggccgacaacaugaucaccgagaugcugcagaaggaguacauggacagacagggcaagaccccccugggccugguggaccuguucguguucagcaccagcuucuaccugaucagcaucuuccugcaccuggugaagauccccugaggacuaguuauaagacugacuagcccgaugggccucccaacgggcccuccuccccuccuugcaccgagauuaaucaaaggcucuuuucagagccaccaaaaaaaaaaaaaaaaaaaaaaaaaaaaaaaaaaaaaaaaaaaaaaaaaaaaaaaaaaaaaaaaagaauu

SEQ ID NO: 42999 - RNA, 1541 nt, Artificial Sequence
  mRNA product Design i-3 (hSL-A64-N5) comprising derived and/or modified sequence from LASV(LASV237-NIG-2010;Clade II)__AIT17638__GPCmut13 (opt4)
aggagaaagcuuaccaugggccagaucaucaccuucuuccaggaggugccccacgugaucgaggaggugaugaacaucgugcugaucgcccugagccugcuggccauccugaagggcaucuacaacguggccaccugcggccuguucggccuggugagcuuccugcugcugugcggcagaagcugcagcaccaccuacaagggcguguacgagcugcagacccuggagcuggacauggccagccugaacaugaccaugccccugagcugcaccaagaacaacagccaccacuacaucauggugggcaacgagaccggccuggagcugacccugaccaacaccagcaucaucaaccacaaguucugcaaccugagcgacgcccacaagaaggaccuguacgaccacgcccugaugagcaucaucagcaccuuccaccugagcauccccaacuucaaccaguacgaggccaugagcugcgacuucaacggcggcaagaucagcgugcaguacaaccugagccacaccuacgccguggacgccgccaaccacugcggcaccaucgccaacggcgugcugcagaccuucaugagaauggccuggggcggcagcuacaucgcccuggacagcggcaagggcagcugggacugcaucaugaccagcuaccaguaccugaucauccagaacaccaccugggaggaccacugccaguucagcagacccagccccaucggcuaccugggccugcugagccagagaaccagagacaucuacaucagcagaagacugcugggcaccuucaccuggacccugagcgacagcgagggcaacgagacccccggcggcuacugccugaccagauggaugcugaucgaggccgagcugaagugcuucggcaacaccgccguggccaagugcaacgagaagcacgacgaggaguucugcgacaugcugagacuguucgacuucaacaagcaggccaucagaagacugaagaccgaggcccagaugagcauccagcugaucaacaaggccgugaacgcccugaucaacgaccagcugaucaugaagaaccaccugagagacaucaugggcauccccuacugcaacuacagcaaguacugguaccugaaccacaccgugaccggcaagaccagccugcccagaugcuggcuggugagcaacggcagcuaccugaacgagacccacuucagcgacgacaucgagcagcaggccgacaacaugaucaccgagcugcugcagaaggaguacauggacagacagggcaagaccccccugggccugguggaccuguucguguucagcaccagcuucuaccugaucagcaucuuccugcaccugaucaagauccccugaggacuaguuauaagacugacuagcccgaugggccucccaacgggcccuccuccccuccuugcaccgagauuaaucaaaggcucuuuucagagccaccaaaaaaaaaaaaaaaaaaaaaaaaaaaaaaaaaaaaaaaaaaaaaaaaaaaaaaaaaaaaaaaaagaauu

SEQ ID NO: 43000 - RNA, 1541 nt, Artificial Sequence
  mRNA product Design i-3 (hSL-A64-N5) comprising derived and/or modified sequence from LASV(LASV253-NIG-2011;Clade II)__AIT17670__GPCmut13 (opt4)
aggagaaagcuuaccaugggccagaucaucaccuucuuccaggaggugccccacgugaucgaggaggugaugaacaucgugcugaucgcccugagccugcuggccauccugaagggcaucuacaacguggccaccugcggccuguucggccuggugagcuuccugcugcugugcggcagaagcugcagcaccaccuacaagggcguguacgagcugcagacccuggagcuggacauggccagccugaacaugaccaugccccugagcugcaccaagaacaacagccaccacuacaucauggugggcaacgagaccggccuggagcugacccugaccaacaccagcaucaucaaccacaaguucugcaaccugagcgacgcccacaagaagaaccuguacgaccacgcccugaugagcaucaucagcaccuuccaccugagcauccccaacuucaaccaguacgaggccaugagcugcgacuucaacggcggcaagaucagcgugcaguacaaccugagccacaccuacgccguggacgccgccaaccacugcggcaccaucgccaacggcgugcugcagaccuucaugagaauggccuggggcggcagcuacaucgcccuggacagcggcaagggcagcugggacugcaucaugaccagcuaccaguaccugaucauccagaacaccaccugggaggaccacugccaguucagcagacccagccccaucggcuaccugggccugcugagccagagaaccagagacaucuacaucagcagaagacugcugggcaccuucaccuggacccugagcgacagcgagggcaacgagacccccggcggcuacugccugaccagauggaugcugaucgaggccgagcugaagugcuucggcaacaccgccguggccaagugcaacgagaagcacgacgaggaguucugcgacaugcugagacuguucgacuucaacaagcaggccaucagaagacugaaggccgaggcccagaugagcauccagcugaucaacaaggccgugaacgcccugaucaacgaccagcugaucaugaagaaccaccugagagacaucaugggcauccccuacugcaacuacagcaaguacugguaccugaaccacaccgugaccggcagaaccagccugcccagaugcuggcuggugagcaacggcagcuaccugaacgagacccacuucagcgacgacaucgagcagcaggccgacaacaugaucaccgagcugcugcagaaggaguacaucgacagacagggcaagaccccccugggccugguggaccuguucguguucagcaccagcuucuaccugaucagcaucuuccugcaccuggugaagauccccugaggacuaguuauaagacugacuagcccgaugggccucccaacgggcccuccuccccuccuugcaccgagauuaaucaaaggcucuuuucagagccaccaaaaaaaaaaaaaaaaaaaaaaaaaaaaaaaaaaaaaaaaaaaaaaaaaaaaaaaaaaaaaaaaagaauu

SEQ ID NO: 43001 - RNA, 1541 nt, Artificial Sequence
  mRNA product Design i-3 (hSL-A64-N5) comprising derived and/or modified sequence from LASV(LASV254-NIG-2011;Clade II)__AIT17674__GPCmut13 (opt4)
aggagaaagcuuaccaugggccagaucaucaccuucuuccaggaggugccccacgugaucgaggaggugaugaacaucgugcugaucgcccugagccugcuggccauccugaagggcaucuacaacguggccaccugcggccuguucggccuggugagcuuccugcugcugugcggcagaagcugcagcaccaccuacaagggcguguacgagcugcagacccuggagcuggacaugaccaaccugaacaugaccaugccccugagcugcaccaagaacaacagccaccacuacaucauggugggcaacgagaccggccuggagcugacccugaccaacaccagcaucaucaaccacaaguucugcaaccugagcgacgcccacaagaagaaccuguacaaccacgcccugaugagcaucaucagcaccuuccaccugagcauccccaacuucaaccaguacgaggccaugagcugcgacuucaacggcggcaagaucagcgugcaguacaaccugagccacagcuacgccguggacgccgccaaccacugcggcaccaucgccaacggcgugcugcagaccuucaugagaauggccuggggcggcagcuacaucgcccuggacagcggcaagggcaacugggacugcaucaugaccagcuaccaguaccugaucauccagaacaccaccugggaggaccacugccaguucagcagacccagccccaucggcuaccugggccugcugagccagagaaccagagacaucuacaucagcagaagacugcugggcaccuucaccuggacccugagcgacagcgagggcaacgagacccccggcggcuacugccugaccagauggaugcugaucgaggccgagcugaagugcuucggcaacaccgccguggccaagugcaacgagaagcacgacgaggaguucugcgacaugcugagacuguucgacuucaacaagcaggccaucagaagacugaagaccgaggcccaggccaacauccagcugaucaacaaggccgugaacgcccugaucaacgaccagcugaucaugaagaaccaccugagagacaucaugggcauccccuacugcaacuacagcaaguacugguaccugaaccacaccgugaccggcaagaccagccugcccagaugcuggcuggugagcaacggcagcuaccugaacgagacccacuucagcgacgacaucgagcagcaggccgacaacaugaucaccgagcugcugcagaaggaguacauggacagacagggcaagaccccccugggccugguggaccuguucguguucagcaccagcuucuaccugaucagcaucuuccugcaccuggugaagauccccugaggacuaguuauaagacugacuagcccgaugggccucccaacgggcccuccuccccuccuugcaccgagauuaaucaaaggcucuuuucagagccaccaaaaaaaaaaaaaaaaaaaaaaaaaaaaaaaaaaaaaaaaaaaaaaaaaaaaaaaaaaaaaaaaagaauu

SEQ ID NO: 43002 - RNA, 1541 nt, Artificial Sequence
  mRNA product Design i-3 (hSL-A64-N5) comprising derived and/or modified sequence from LASV(Nig08-A19;Clade III)__ADU56618__GPCmut13 (opt4)
aggagaaagcuuaccaugggccagaucgugaccuucuuccaggaggugccccacgugaucgaggaggugaugaacaucgugcugaucgcccugagcauccuggccauccugaagggccuguacaacaucgccaccugcggccugaucggccuggugaccuuccugcugcugagcggcagaagcugcagcaugaccuacaagggcguguacgagcugcagacccuggagcugaacaugaacacccugaacaugaccaugccccugagcugcaccaagaacaacagccaccacuacaucauggugggcaacgagaccggccuggagcugacccugaccaacaccagccugcugcaccacaaguucugcaaccugagcgacgcccacaagaagaaccuguacgaccacacccugaugagcaucaucagcaccuuccaccugagcauccccaacuucaaccaguacgaggccaugagcugcgacuucaacggcggcaagaucaccgugcaguacaaccugagccacagcuacgccaucgacgccgccaaccacugcggcaccguggccaacggcgugcugcagaccuucaugagaauggccuggggcggcagcuacaucgcccuggacagcggcagaggcaagugggacugcaucaugaccagcuaccaguaccugaucauccagaacaccaccugggaggaccacugccaguucagcagacccagccccaucggcuaccugggccugcugagccagagaaccagagacaucuacaucagcagaagacugcugggcaccuucaccuggacccugagcgacagcgagggcaacgagacccccggcggcuacugccugaccagauggaugcugaucgaggccgagcugaagugcuucggcaacaccgccguggccaagugcaacgagaagcacgacgaggaguucugcgacaugcugagacuguucgacuucaacaagcaggccaucagaagacugaaggccgaggcccagaugagcauccagcugaucaacaaggccgugaacgcccugaucaacgaccagcugaucaugaagaaccaccugagagacaucaugggcauccccuacugcaacuacagcaaguacugguaccugaaccacaccagcaccggcagaaccagccugcccagaugcuggcuggugagcaacggcagcuaccugaacgagacccacuucagcgacgacaucgagcagcaggccgacaacaugaucaccgagaugcugcagaaggaguaccuggacagacagggcaagaccccccugggccugguggaccuguucguguucagcaccagcuucuaccugaucagcaucuuccugcaccuggugaagauccccugaggacuaguuauaagacugacuagcccgaugggccucccaacgggcccuccuccccuccuugcaccgagauuaaucaaaggcucuuuucagagccaccaaaaaaaaaaaaaaaaaaaaaaaaaaaaaaaaaaaaaaaaaaaaaaaaaaaaaaaaaaaaaaaaagaauu

SEQ ID NO: 43003 - RNA, 1544 nt, Artificial Sequence
  mRNA product Design i-3 (hSL-A64-N5) comprising derived and/or modified sequence from LASV(G1180-SLE-2010;Clade IV)__AIT17168__GPCmut13 (opt4)
aggagaaagcuuaccaugggccagaucgugaccuucuuccaggaggugccccacgugaucgaggaggugaugaacaucgugcugaucgcccugagcauccuggccgugcugaagggccuguacaacuucgccaccugcggccuggugggccugcugaccuuccugcugcugugcggcagaagcugcaccgccagcagauacaagggcguguacgagcugcagacccuggagcugaacauggagacccugaacaugaccaugccccugagcugcaccaagaacaacagccaccacuacaucauggugggcaacgagaccggccuggagcugacccugaccaacaccagcaucaucaaccacaaguucugcaaccugagcgacgcccacaagaagaaccuguacgaccacgcccugaugagcaucaucagcaccuuccaccugagcauccccaacuucaaccaguacgaggccaugagcugcgacuucaacggcggcaagaucagcgugcaguacaaccugagccacagcuacgccggcgacgccgccaaccacugcggcaccguggccaacggcgugcugcagaccuucaugagaauggccuggggcggcagcuacaucgcccuggacagcggccacggcagcugggacugcaucaugaccagcuaccaguaccugaucauccagaacaccaccugggaggaccacugccaguucagcagacccagccccaucggcuaccugggccugcugagccagagaaccagagacaucuacaucagcagaagacugcugggcaccuucaccuggacccugagcgacagcgagggcaaggacacccccggcggcuacugccugaccagauggaugcugaucgaggccgagcugaagugcuucggcaacaccgccguggccaagugcaacgagaagcacgacgaggaguucugcgacaugcugagacuguucgacuucaacaagcaggccauccagagacugaaggccgaggcccagaugagcauccagcugaucaacaaggccgugaacgcccugaucaacgaccagcugaucaugaagaaccaccugagagacaucaugggcauccccuacugcaacuacagcaaguacugguaccugaaccacaccaccaccggcaagaccagccugcccaagugcuggcuggugagcaacggcagcuaccugaacgagacccacuucagcgacgacaucgagcagcaggccgacaacaugaucaccgagaugcugcagaaggaguacauggagagacagggcaagaccccccugggccugguggaccuguucguguucagcaccagcuucuaccugaucagcaucuuccugcaccuggugaagauccccugaggacuaguuauaagacugacuagcccgaugggccucccaacgggcccuccuccccuccuugcaccgagauuaaucaaaggcucuuuucagagccaccaaaaaaaaaaaaaaaaaaaaaaaaaaaaaaaaaaaaaaaaaaaaaaaaaaaaaaaaaaaaaaaaagaauu

SEQ ID NO: 43004 - RNA, 1544 nt, Artificial Sequence
  mRNA product Design i-3 (hSL-A64-N5) comprising derived and/or modified sequence from LASV(G1442-SLE-2011;Clade IV)__AIT17180__GPCmut13 (opt4)
aggagaaagcuuaccaugggccagaucgugaccuucuuccaggaggugccccacgugaucgaggaggugaugaacaucgugcugaucgcccugagcauccuggccgugcugaagggccuguacaacguggccaccugcggccugaucggccuggugaccuuccugcugcugugcggcagaagcugcaccaccacccuguacaagggcguguacgagcugcagacccuggagcugaacauggagacccugaacaugaccaugccccugagcugcaccaagaacaacagccaccacuacaucagagugggcaacgagaccggccuggagcugacccugaccaacaccagcaucaucaaccacaaguucugcaaccugagcgacgcccacaagaagaaccuguacgaccacgcccugaugagcaucaucagcaccuuccaccugagcauccccaacuucaaccaguacgaggccaugagcugcgacuucaacggcggcaagaucagcgugcaguacaaccugagccacagcuacgccggcgacgccgccaaccacugcggcaccguggccaacggcgugcugcagaccuucaugagaauggccuggggcggcagcuacaucgcccuggacagcggcagaggcaacugggacugcaucaugaccagcuaccaguaccugaucauccagaacaccaccugggacgaccacugccaguucagcagacccagccccaucggcuaccugggccugcugagccagagaaccagagacguguacaucagcagaagacugcugggcaccuucaccuggacccugagcgacagcgagggcaaggacacccccggcggcuacugccugaccagauggaugcugaucgaggccgagcugaagugcuucggcaacaccgccguggccaagugcaacgagaagcacgacgaggaguucugcgacaugcugagacuguucgacuucaacaagcaggccauccagagacugaaggccgaggcccagaugagcauccagcugaucaacaaggccgugaacgcccugaucaacgaccagcugaucaugaagaaccaccugagagacaucaugggcauccccuacugcaacuacagcaaguacugguaccugaacaacaccgccaccggcaagaccagccugcccaagugcuggcugaucagcaacggcagcuaccugaacgagacccacuucagcgacgacaucgagcaggaggccgacaacaugaucaccgagaugcugcagaaggaguacauggagagacagggcaagaccccccugggccugguggaccuguucguguucagcaccagcuucuaccugaucagcaucuuccugcaccuggugaagauccccugaggacuaguuauaagacugacuagcccgaugggccucccaacgggcccuccuccccuccuugcaccgagauuaaucaaaggcucuuuucagagccaccaaaaaaaaaaaaaaaaaaaaaaaaaaaaaaaaaaaaaaaaaaaaaaaaaaaaaaaaaaaaaaaaagaauu

SEQ ID NO: 43005 - RNA, 1544 nt, Artificial Sequence
  mRNA product Design i-3 (hSL-A64-N5) comprising derived and/or modified sequence from LASV(G3010-SLE-2013;Clade IV)__AIT17344__GPCmut13 (opt4)
aggagaaagcuuaccaugggccagaucgugaccuucuuccaggaggugccccacgugaucgaggaggugaugaacaucgugcugaucgcccugagcauccuggccgugcugaagggccuguacaacuucgccaccugcggccuggugggccuggugaccuuccugcugcugugcggcagaagcugcaccaccagccuguacaagggcguguacgagcugcagacccuggagcugaacauggagacccugaacaugaccaugccccugagcugcaccaagaacaacagccaccacuacaucauggugggcaacgagaccggccuggagcugacccugaccaacaccagcaucaucaaccacaaguucugcaaccugagcgacgcccacaagaagaaccuguacaaccacgcccugaugagcaucaucagcaccuuccaccugagcauccccaacuucaaccaguacgaggccaugagcugcgacuucaacggcggcaagaucagcgugcaguacaaccugagccacagcuacgccggcgacgccgccagccacugcggcaccguggccaacggcgugcugcagaccuucaugagaauggccuggggcggcagcuacaucgcccuggacagcggcuacggcaagugggacugcaucaugaccagcuaccaguaccugaucauccagaacaccaccugggaggaccacugccaguucagcagacccagccccaucggcuaccugggccugcugagccagagaaccagagacaucuacaucagcagaagacugcugggcaccuucaccuggacccugagcgacagcgagggcaaggacacccccggcggcuacugccugaccagauggaugcugaucgaggccgagcugaagugcuucggcaacaccgccguggccaagugcaacgagaagcacgacgaggaguucugcgacaugcugagacuguucgacuucaacaagcaggccauccagagacugaagaccgaggcccagaugagcauccagcugaucaacaaggccgugaacgcccugaucaacgaccagcugaucaugaagaaccaccugagagacaucaugggcauccccuacugcaacuacagcaaguacugguaccugaaccacaccaccaccggcaagaccagccugcccaagugcuggcuggugagcaacggcagcuaccugaacgagacccacuucagcgacgacaucgagcagcaggccgacaacaugaucaccgagaugcugcagaaggaguacauggagagacagggcaagaccccccugggccugguggaccuguucguguucagcaccagcuucuaccugaucagcaucuuccugcaccuggugaagauccccugaggacuaguuauaagacugacuagcccgaugggccucccaacgggcccuccuccccuccuugcaccgagauuaaucaaaggcucuuuucagagccaccaaaaaaaaaaaaaaaaaaaaaaaaaaaaaaaaaaaaaaaaaaaaaaaaaaaaaaaaaaaaaaaaagaauu

SEQ ID NO: 43006 - RNA, 1544 nt, Artificial Sequence
  mRNA product Design i-3 (hSL-A64-N5) comprising derived and/or modified sequence from LASV(G502-SLE-2009;Clade IV)__AIT17126__GPCmut13 (opt4)
aggagaaagcuuaccaugggccagaucgugaccuucuuccaggaggugccccacgugaucgaggaggugaugaacaucgugcugaucgcccugagcauccuggccgugcugaagggccuguacaacuucgccaccugcggccuggugggccugcugaccuuccugcugcugugcggcagaagcugcaccaccggccuguacaagggcguguacgagcugcagacccuggagcugaacauggagacccugaacaugaccaugccccugagcugcaccaagaacaacagccaccacuacaucauggugggcaacgagaccggccuggagcugacccugaccaacaccagcaucaucaaccacaaguucugcaaccugagcgacgcccacaagaagaaccuguacgaccacgcccugaugagcaucaucagcaccuuccaccugagcauccccaacuucaaccaguacgaggccaugagcugcgacuucaacggcggcaagaucagcgugcaguacaaccugagccacagcuacgccggcgacgccgccgaccacugcggcaccguggccaacggcgugcugcagaccuucaugagaauggccuggggcggcagcuacaucgcccuggacagcggcagaggcagaugggacugcaucaugaccagcuaccaguaccugaucauccagaacaccaccugggaggaccacugccaguucagcagacccagccccaucggcuaccugggccugcugagccagagaaccagagacaucuacaucagcagaagacugcugggcaccuucaccuggacccugagcgacagcgagggcaaggacacccccggcggcuacugccugaccagauggaugcugaucgaggccgagcugaagugcuucggcaacaccgccguggccaagugcaacgagaagcacgacgaggaguucugcgacaugcugagacuguucgacuucaacaagcaggccauccagagacugaaggccgaggcccagaugagcauccagcugaucaacaaggccgugaacgcccugaucaacgaccagcuggugaugaagaaccaccugagagacaucaugggcauccccuacugcaacuacagcagauacugguaccugaaccacaccaccaccggcagaaccagccugcccaagugcuggcuggugagcaacggcagcuaccugaacgagacccacuucagcgacgacaucgagcagcaggccgacaacaugaucaccgagaugcugcagaaggaguacauggagagacagggcaagaccccccugggccugguggaccuguucguguucagcaccagcuucuaccugaucagcaucuuccugcaccuggugaagauccccugaggacuaguuauaagacugacuagcccgaugggccucccaacgggcccuccuccccuccuugcaccgagauuaaucaaaggcucuuuucagagccaccaaaaaaaaaaaaaaaaaaaaaaaaaaaaaaaaaaaaaaaaaaaaaaaaaaaaaaaaaaaaaaaaagaauu

SEQ ID NO: 43007 - RNA, 1544 nt, Artificial Sequence
  mRNA product Design i-3 (hSL-A64-N5) comprising derived and/or modified sequence from LASV(G733-SLE-2010;Clade IV)__AIT17154__GPCmut13 (opt4)
aggagaaagcuuaccaugggccagaucgugaccuucuuccaggaggugccccacgugaucgaggaggugaugaacaucgugcugaucgcccugagcauccuggccgugcugaagggccuguacaacuucgccaccugcggcaucgugggccuggugagcuuccugcugcugugcggcagaagcugcaccaccagccuguacaagggcguguacgagcugcagacccuggagcugaacauggagacccugaacaugaccaugccccugagcugcaccaagaacaacagccaccacuacaucauggugggcaacgagaccggccuggagcugacccugaccaacaccagcaucaucaaccacaaguucugcaaccugagcgacgcccacaagaagaaccuguacgaccacgcccugaugagcaucaucagcaccuuccaccugagcauccccaacuucaaccaguacgaggccaugagcugcgacuucaacggcggcaagaucagcgugcaguacaaccugagccacagcuacgccggcgacgccgccaaccacugcggcaccaucgccaacggcgugcugcagaccuucaugagaauggccuggggcggcagcuacaucgcccuggacagcggcagagacagaugggacugcaucaugaccagcuaccaguaccugaucauccagaacaccaccugggaggaccacugccaguucagcagacccagccccaucggcuaccugggccugcugagccagagaaccagagacaucuacaucagcagaagacugcugggcaccuucaccuggacccugagcgacagcgagggcaaggacacccccggcggcuacugccugaccagauggaugcugaucgaggccgagcugaagugcuucggcaacaccgccguggccaagugcaacgagaagcacgacgaggaguucugcgacaugcugagacuguucgacuucaacaagcaggccauccagagacugaaggccgaggcccagaugagcauccagcugaucaacaaggccgugaacgcccugaucaacgaccagcugaucaugaagaaccaccugagagacaucaugggcauccccuacugcaacuacagcaaguacugguaccugaaccacaccaccaccggcaagaccagccugcccaagugcuggcuggugagcaacggcagcuaccugaacgagacccacuucagcgacgacaucgagcagcaggccgacaacaugaucaccgagaugcugcagaaggaguacauggagagacagggcaagaccccccugggccugguggaccuguucguguucagcaccagcuucuaccugaucagcaucuuccugcaccuggugaagauccccugaggacuaguuauaagacugacuagcccgaugggccucccaacgggcccuccuccccuccuugcaccgagauuaaucaaaggcucuuuucagagccaccaaaaaaaaaaaaaaaaaaaaaaaaaaaaaaaaaaaaaaaaaaaaaaaaaaaaaaaaaaaaaaaaagaauu

SEQ ID NO: 43008 - RNA, 1544 nt, Artificial Sequence
  mRNA product Design i-3 (hSL-A64-N5) comprising derived and/or modified sequence from MOPV/LASV reassortant(IGS-1;Clade IV)__AFY05576__GPCmut13 (opt4)
aggagaaagcuuaccaugggccagaucgugaccuucuuccaggaggugccccacgugaucgaggaggugaugaacaucgugcugaucgcccugagcgugcuggccgugcugaagggccuguacaacuucgccaccugcggccuggugggccuggugaccuuccugcugcugugcggcagaagcugcaccaccagccuguacaagggcguguacgagcugcagacccuggagcugaacauggagacccugaacaugaccaugccccugagcugcaccaagaacaacagccaccacuacaucauggugggcaacgagaccggccuggagcugacccugaccaacaccagcaucaucaaccacaaguucugcaaccugagcgacgcccacaagaagaaccuguacgaccacgcccugaugagcaucaucagcaccuuccaccugagcauccccaacuucaaccaguacgaggccaugagcugcgacuucaacggcggcaagaucagcgugcaguacaaccugagccacagcuacgccggcgacgccgccaaccacugcggcaccguggccaacggcgugcugcagaccuucaugagaauggccuggggcggcagcuacaucgcccuggacagcggcagaggcaacugggacugcaucaugaccagcuaccaguaccugaucauccagaacaccaccugggaggaccacugccaguucagcagacccagccccaucggcuaccugggccugcugagccagagaaccagagacaucuacaucagcagaagacugcugggcaccuucaccuggacccugagcgacagcgagggcgaggacacccccggcggcuacugccugaccagauggaugcugaucgaggccgagcugaagugcuucggcaacaccgccguggccaagugcaacgagaagcacgacgaggaguucugcgacaugcugagacuguucgacuucaacaagcaggccauccagagacugaaggccgaggcccagaugagcauccagcugaucaacaaggccgugaacgcccugaucaacgaccagcugaucaugaagaaccaccugagagacaucaugggcauccccuacugcaacuacagcaaguacugguaccugaaccacaccaccaccggcagaaccagccugcccaagugcuggcuggugagcaacggcagcuaccugaacgagacccacuucagcgacgacaucgagcagcaggccgacaacaugaucaccgagaugcugcagaaggaguacauggagagacagggcaagaccccccugggccugguggaccuguucguguucagcaccagcuucuaccugaucagcaucuuccugcaccuggugaagauccccugaggacuaguuauaagacugacuagcccgaugggccucccaacgggcccuccuccccuccuugcaccgagauuaaucaaaggcucuuuucagagccaccaaaaaaaaaaaaaaaaaaaaaaaaaaaaaaaaaaaaaaaaaaaaaaaaaaaaaaaaaaaaaaaaagaauu

SEQ ID NO: 43009 - RNA, 1544 nt, Artificial Sequence
  mRNA product Design i-3 (hSL-A64-N5) comprising derived and/or modified sequence from LASV(LM765-SLE-2012;Clade IV)__AIT17814__GPCmut13 (opt4)
aggagaaagcuuaccaugggccagaucgugaccuucuuccaggaggugccccacgugaucgaggaggugaugaacaucgugcugaucgcccugagcauccuggccgugcugaagggccuguacaacuucgccaccugcggccuggugggccuggugaccuuccugcugcugugcggcagaagcugcaccaccagccuguacaagggcguguacgagcugcagacccuggagcugaacauggagacccugaacaugaccaugccccugagcugcaccaagaacaacagccaccacuacaucauggugggcaacgagaccggccuggagcugacccugaccaacaccagcaucaucgaccacaaguucugcaaccugagcgacgcccacagaaagaaccuguacgaccacgcccugaugagcaucaucagcaccuuccaccugagcauccccaacuucaaccaguacgaggccaugagcugcgacuucaacggcggcaagaucagcgugcaguacaaccugagccacagcuacgccaaggacgccgccgaccacugcggcaccguggccaacggcgugcugcagaccuucaugagaauggccuggggcggcagcuacaucgcccuggacagcggcagaggcagaugggacugcaucaugaccagcuaccaguaccugaucauccagaacaccaccugggaggaccacugccaguucagcagacccagccccaucggcuaccugggccugcugagccagagaaccagagacaucuacaucagcagaagacugcugggcaccuucaccuggacccugagcgacagcgagggcaaggacacccccggcggcuacugccugaccagauggaugcugaucgaggccgagcugaagugcuucggcaacaccgccguggccaagugcaacgagaagcacgacgaggaguucugcgacaugcugagacuguucgacuucaacaagcaggccauccagagacugaaggccgaggcccagaugagcauccagcugaucaacaaggccgugaacgcccugaucaacgaccagcugaucaugaagaaccaccugagagacaucaugggcauccccuacugcaacuacagcaaguacugguaccugaaccacaccaccaccggcaagaccagccugcccaagugcuggcuggugagcaacggcagcuaccugaacgagacccacuucagcgacgacaucgagcagcaggccgacaacaugaucaccgagaugcugcagaaggaguacauggagagacagggcaagaccccccugggccugguggaccuguucguguucagcaccagcuucuaccugaucagcaucuuccugcaccuggugaagauccccugaggacuaguuauaagacugacuagcccgaugggccucccaacgggcccuccuccccuccuugcaccgagauuaaucaaaggcucuuuucagagccaccaaaaaaaaaaaaaaaaaaaaaaaaaaaaaaaaaaaaaaaaaaaaaaaaaaaaaaaaaaaaaaaaagaauu

SEQ ID NO: 43010 - RNA, 1544 nt, Artificial Sequence
  mRNA product Design i-3 (hSL-A64-N5) comprising derived and/or modified sequence from LASV(LM776-SLE-2012;Clade IV)__AIT17824__GPCmut13 (opt4)
aggagaaagcuuaccaugggccagaucgugaccuucuuccaggaggugccccacgugaucgaggaggugaugaacaucgugcugaucgcccugagcauccuggccgugcugaagggccuguacaacuucgccaccugcggccuggugggccuggugaccuuccugcugcugugcggcagaagcugcaccaccagcguguacaagggcguguacgagcugcagacccuggagcugaacauggagacccugaacaugaccaugccccugagcugcaccaagaacaacagccaccacuacaucauggugggcaacgagaccggccuggagcugacccugaccaacaccagcaucaucaaccacaaguucugcaaccugagcgacgcccacaagaagaaccuguacgaccacgcccugaugagcaucaucagcaccuuccaccugagcauccccaacuucaaccaguacgaggccaugagcugcgacuucaacggcggcaagaucagcgugcaguacaaccugagccacagcuacgccggcgacgccgccaaccacugcggcaccguggccaacggcgugcugcagaccuucaugagaauggccuggggcggcagcuacaucgcccuggacagcggccacggcaagugggacugcaucaugaccagcuaccaguaccugaucauccagaacaccaccugggaggaccacugccaguucagcagacccagccccaucggcuaccugggccugcugagccagagaaccagagacaucuacaucagcagaagacugcugggcaccuucaccuggacccugagcgacagcgagggcaaggacacccccggcggcuacugccugaccagauggaugcugaucgaggccgagcugaagugcuucggcaacaccgccguggccaagugcaacgagaagcacgacgaggaguucugcgacaugcugagacuguucgacuucaacaagcaggccauccagagacugaaggccgaggcccagaugagcauccagcugaucaacaaggccgugaacgcccugaucaacgaccagcugaucaugaagaaccaccugagagacaucaugggcauccccuacugcaacuacagcaaguacugguaccugaaccacaccaccaccggcaagaccagccugcccaagugcuggcuggugagcaacggcagcuaccugaacgagacccacuucagcgacgacaucgagcagcaggccgacaacaugaucaccgagaugcugcagaaggaguacauggagagacagggcaagaccccccugggccugguggaccuguucguguucagcaccagcuucuaccugaucagcaucuuccugcaccuggugaagauccccugaggacuaguuauaagacugacuagcccgaugggccucccaacgggcccuccuccccuccuugcaccgagauuaaucaaaggcucuuuucagagccaccaaaaaaaaaaaaaaaaaaaaaaaaaaaaaaaaaaaaaaaaaaaaaaaaaaaaaaaaaaaaaaaaagaauu

SEQ ID NO: 43011 - RNA, 1544 nt, Artificial Sequence
  mRNA product Design i-3 (hSL-A64-N5) comprising derived and/or modified sequence from LASV(Mad39;Clade IV)__ANH09722__GPCmut13 (opt4)
aggagaaagcuuaccaugggccagaucgugaccuucuuccaggaggugccccacgugaucgaggaggugaugaacaucgugcugaucgcccugagcauccuggccgugcugaagggccuguacaacguggccaccugcggccugaucggccuggugaccuuccugcugcugugcggcagaagcugcaccaccacccuguacaagggcguguacgagcugcaggcccuggagcugaacauggagacccugaacaugaccaugccccugagcugcaccaagaacaacagccaccacuacaucagagugggcaacgagaccggccuggagcugacccugaccaacaccagccugaucaaccacaaguucugcaaccugagcgacgcccacaagaagaaccuguacgaccacgcccugaugagcaucaucagcaccuuccaccugagcauccccaacuucaaccaguacgaggccaugagcugcgacuucaacgacggcaagaucagcgugcaguacaaccugagccacaccuacgccggcgacaccgccaaccacugcggcaccguggccaacggcgugcugcagaccuucaugagaauggccuggggcggcagcuacaucgcccuggacagcggcagaggcggcugggacugcaucaugaccagcuaccaguaccugaucauccagaacaccaccugggaggaccacugccaguucagcagacccagccccaucggcuaccugggccugcugagccagagaaccagagacaucuacaucagcagaagacugcugggcaccuucaccuggacccugagcgacagcgagggcaaggacacccccggcggcuacugccugaccagauggaugcugaucgaggccgagcugaagugcuucggcaacaccgccguggccaagugcaacgagaagcacgacgaggaguucugcgacaugcugagacuguucgacuucaacaagcaggccauccagagacugaaggccgaggcccagaugagcauccagcugaucaacaaggccgugaacgcccugaucaacgaccagcugaucaugaagaaccaccugagagacaucaugggcauccccuacugcaacuacagcaaguacugguaccugaaccacaccgugaccggcaagaccagccugcccaagugcuggcuggugagcaacggcagcuaccugaacgagacccacuucagcgacgacaucgagcagcaggccgacaacaugaucaccgagaugcugcagaaggaguacauggagagacagggcaagaccccccugggccugguggaccuguucguguucagcaccagcuucuaccugaucagcaucuuccugcaccuggugaagauccccugaggacuaguuauaagacugacuagcccgaugggccucccaacgggcccuccuccccuccuugcaccgagauuaaucaaaggcucuuuucagagccaccaaaaaaaaaaaaaaaaaaaaaaaaaaaaaaaaaaaaaaaaaaaaaaaaaaaaaaaaaaaaaaaaagaauu

SEQ ID NO: 43012 - RNA, 1544 nt, Artificial Sequence
  mRNA product Design i-3 (hSL-A64-N5) comprising derived and/or modified sequence from LASV(Z0947-SLE-2011;Clade IV)__AIT17840__GPCmut13 (opt4)
aggagaaagcuuaccaugggccagaucgugaccuucuuccaggaggugccccacgugaucgaggaggugaugaacaucgugcugaucgcccugagcauccuggccgugcugaagggccuguacaacuucgccaccugcggccuggugggccuggugaccuuccugcugcugugcggcagaagcugcaccaucagccuguacaagggcguguacgagcugcagacccuggagcugaacauggagacccugaacaugaccaugccccugagcugcaccaagaacaacagccaccacuacaucauggugggcaacgagaccggccuggagcugacccugaccaacaccagcaucaucaaccacaaguucugcaaccugagcgacgcccacaagaagaaccuguacgaccacgcccugaugagcaucaucagcaccuuccaccugagcauccccaacuucaaccaguacgaggccaugagcugcgacuucaacggcggcaagaucagcgugcaguacaaccugagccacagcuacgccggcgacgccgccaaccacugcggcaccguggccaacggcgugcugcagaccuucaugagaauggccuggggcggcagcuacaucgcccuggacagcggcagagacagaugggacugcaucaugaccagcuaccaguaccugaucauccagaacaccaccugggaggaccacugccaguucagcagacccagccccaucggcuaccugggccugcugagccagagaaccagagacaucuacaucagcagaagacugcugggcaccuucaccuggacccugagcgacagcgagggcaaggacacccccggcggcuacugccugaccagauggaugcugaucgaggccgagcugaagugcuucggcaacaccgccguggccaagugcaacgagaagcacgacgaggaguucugcgacaugcugagacuguucgacuucaacaagcaggccauccagagacugaaggccgaggcccagaugagcauccagcugaucaacaaggccgugaacgcccugaucaacgaccagcugaucaugaagaaccaccugagagacaucaugggcauccccuacugcaacuacagcaaguacugguaccugaaccacaccaccaccggcaagaccagccugcccaagugcuggcuggugagcaacggcagcuaccugaacgagacccacuucagcgacgacaucgagcagcaggccgacaacaugaucaccgagaugcugcagaaggaguacauggagagacagggcaagaccccccugggccugguggaccuguucguguucagcaccagcuucuaccugaucagcaucuuccugcaccuggugaagauccccugaggacuaguuauaagacugacuagcccgaugggccucccaacgggcccuccuccccuccuugcaccgagauuaaucaaaggcucuuuucagagccaccaaaaaaaaaaaaaaaaaaaaaaaaaaaaaaaaaaaaaaaaaaaaaaaaaaaaaaaaaaaaaaaaagaauu

SEQ ID NO: 43013 - RNA, 1544 nt, Artificial Sequence
  mRNA product Design i-3 (hSL-A64-N5) comprising derived and/or modified sequence from LASV(Josiah;Clade IV)__NP_694870__GPCmut13 (opt5)
aggagaaagcuuaccaugggccagaucgugaccuucuuucaagaggucccccacguuauugaagaggugaugaacaucgugcugauugcccucagcguccuggcugugcuuaaggggcuguacaauuucgccacaugcggacucguuggccuggugacguuucuucugcucugugggagauccugcaccacaucucuguauaaaggagucuacgaacugcagacccucgagcugaacauggaaacacuuaauaugaccaugccucugagcuguacaaagaacaauucccaucacuauaucauggugggcaacgagaccgggcucgagcugacgcuuaccaauacaucuauuaucaaccauaaauucugcaaucugagcgacgcgcacaagaaaaaccucuacgaucaugcucugauguccaucauuucuaccuuucaccugagcaucccgaauuucaaccaguaugaagccauguccugugacuuuaauggaggcaagauuagcguucaguacaaccucucucacuccuaugccggcgaugcugccaaucauugcgggacaguggcuaacggaguccugcaaaccuucaugcggauggccuggggcgggagcuacaucgcgcuugacucuggacgcggcaacugggauuguauuaugacguccuaccaguaucugaucauucagaauacaaccugggaggaccacugccaguuuagcagacccucuccuaucggguaccucggacugcuuucccaacggacacgcgauaucuauauuagcagacggcugcucggcaccuucaccuggacacuguccgacucugaaggcaaggauacgcccgggggauacugucugacccgcuggaugcucaucgaggccgagcugaaaugcuuuggcaacacagcuguggccaaguguaaugaaaaacaugacgaggaguucugcgauaugcuuagacuguuugacuucaacaagcaggcuauucagcggcucaaagccgaagcgcagaugagcauccaacugauuaauaaggccgugaacgcucuuaucaaugaucagcugaucaugaagaaccaccuccgcgacauuauggggaucccuuauugcaauuacuccaaauauugguaccugaaccacaccacaaccggaagaacgagccugcccaaguguuggcucgucucuaauggcuccuaccugaacgaaacacauuucagcgacgauauugagcagcaagccgacaauaugaucaccgagaugcuucagaaagaauauauggagcggcaggggaagaccccucugggacucguugaucuguuuguguucucuaccagcuuuuaccugauuuccaucuuccuucaccucgugaaaaucccgugaggacuaguuauaagacugacuagcccgaugggccucccaacgggcccuccuccccuccuugcaccgagauuaaucaaaggcucuuuucagagccaccaaaaaaaaaaaaaaaaaaaaaaaaaaaaaaaaaaaaaaaaaaaaaaaaaaaaaaaaaaaaaaaaagaauu

SEQ ID NO: 43014 - RNA, 1541 nt, Artificial Sequence
  mRNA product Design i-3 (hSL-A64-N5) comprising derived and/or modified sequence from LASV(LP;Clade I)__AAF86701__GPCmut13 (opt5)
aggagaaagcuuaccaugggccagaucauuaccuucuuucaagaggugccccacgucaucgaagagguuaugaacauugugcugaucgcccucagccugcuugcuauucugaaggggcucuacaauaucgccacaugcggaaucauuggccugguggcguuccuuuuucugugugggaaauccugcucucucacgcugaagggaggcuaugaacugcagacccucgagcugaacauggaaacacuuaauaugaccaugccucugagcuguaccaaaaacuccucucaucacuacaucagagucgggaaugagacaggacucgagcugacacuuaccaacacgagcauuaucaaucauaaguucugcaaccuguccgacgcucacaaaaagaaucucuaugaucaugcccugaugucuauuaucagcaccuuucaccuguccauuccgaacuucaaucaguacgaagccaugagcugugacuuuaacggcggcaagaucucugugcaguauaaucucucccacagcuacgcuggggaugccgcugagcauugcggaacaguugccaacggcgugcugcaaaccuucaugcggauggcguggggagggcgcuauaucgcccuugacucuggcaaagggaauugggauuguauuaugacauccuaccaguaccugaucauucagaacaccacgugggaagaccacugccaguuuagcagacccucuccuaucggauaucucggccugcuuucccaacggacacgcgauauuuacaucagcagacggcugcucggcaccuucacauggacccuguccgacucugaggggaacgagacccccggaggcuauugucugacacgcuggaugcucaucgaagcugagcugaagugcuuugggaauacggccgucgcuaaauguaacgaaaagcaugaugaggaguucugcgacaugcuuagacuguuugauuucaauaaacaggccauucggcgccucaaggcggaagcccagaugagcauccagcugauuaacaaggcugugaaugcccuuaucaacgaccaacugauuaugaaaaaucaccucagagauaucaugggaaucccuuacugcaacuauuccaaguacugguaucugaaucacaccagcucuggccggacaucccugcccaaauguuggcucauuagcaacgggucuuaccugaaugagacccaguucagcgacgacaucgaacagcaagcugauaacaugauuacagagaugcuucagaaggaauacaucgagcgccagggaaaaaccccucugggccucguugacauuuuuaucuucuccacgucuuuuuaucugauuagcaucuuccugcaucuuaucaagauuccgugaggacuaguuauaagacugacuagcccgaugggccucccaacgggcccuccuccccuccuugcaccgagauuaaucaaaggcucuuuucagagccaccaaaaaaaaaaaaaaaaaaaaaaaaaaaaaaaaaaaaaaaaaaaaaaaaaaaaaaaaaaaaaaaaagaauu

SEQ ID NO: 43015 - RNA, 1541 nt, Artificial Sequence
  mRNA product Design i-3 (hSL-A64-N5) comprising derived and/or modified sequence from LASV(803213;Clade II)__AAF86703__GPCmut13 (opt5)
aggagaaagcuuaccaugggccagaucauuaccuucuuucaagaggugccccacgucaucgaagagguuaugaacauugugcugaucgcccucagccugcuugcuauucugaaggggaucuacaauguggccacaugcggacucuucggccugaucuccuuucuucugcucugugggagaucuugcagcgucacguauaaaggaguguacgaacugcagacccuggagcucaacauggcgaaucugaacaugacaaugccucuuuccuguaccaagaauaacucucaucacuauauuaugguuggcaaugaaacagggcuggagcucacccugacaaacaccagcaucauuaaucauaaauucugcaaccuuuccgacgcucacaagaaaaaucuguacgaucaugcccucaugucuaucauuagcacguuucaccuguccaucccgaacuucaaucaguaugaggccaugagcugugacuuuaacggaggcaagauuucugugcaguacaaucugucccacagcuucgcugucgaugccgcuaaccauugcggcaccaucgccaacggggugcuccaaacauuuaugcggauggcguggggaggcucuuauaucgcccuggacuccgggaagggaaauugggauuguauuaugaccagcuaccaguaccuuaucauucagaacacaaccugggaagaccacugccaguucucucgccccuccccuaucggcuaucuggggcuccugagccaaagaacgcgggauauuuacaucucccgcagacuucugggaacauuuaccuggacacucucugacagcgagggcaaugaagcucccggcggguauugucugacccgguggaugcugaucgaggccgagcucaaaugcuucggaaacaccgcuguugccaaguguaaugaaaaacaugaugaggaauuuugcgacaugcugcgccuuuucgauuucaacaagcaggcgauuaaaagacugaagacagaggcccagauguccauccagcucauuaauaaggcugugaacgcccugaucaaugaccaacuuauuaugaaaaaccaucugcgggauaucaugggcaucccuuacugcaauuauagccgcuacugguaucucaaccacacggucaccgggaagacaucucugcccagauguuggcugguguccaauggaagcuaccucaacgaaacccacuuuucugacgacauugagcagcaggcugauaauaugaucacagagaugcugcaaaaagaauacauggaccggcagggcaagaccccucuugggcugguggaucucuucgucuuuagcacguccuucuaucugauuucuaucuuucugcaccuuguuaaaauuccgugaggacuaguuauaagacugacuagcccgaugggccucccaacgggcccuccuccccuccuugcaccgagauuaaucaaaggcucuuuucagagccaccaaaaaaaaaaaaaaaaaaaaaaaaaaaaaaaaaaaaaaaaaaaaaaaaaaaaaaaaaaaaaaaaagaauu

SEQ ID NO: 43016 - RNA, 1541 nt, Artificial Sequence
  mRNA product Design i-3 (hSL-A64-N5) comprising derived and/or modified sequence from LASV(GA391;Clade III)__CAA36645__GPCmut13 (opt5)
aggagaaagcuuaccaugggccagaucgugaccuucuuucaagaggucccccacguuauugaagaggugaugaacaucgugcugauugcccucagcauccuggcuauucuuaaggggcuguacaaugucgccacaugcggacucaucggccuggugacguuccuucugcucuccgggagaucuuguagccugaucuauaaaggaaccuacgaacugcagacacucgagcugaacauggaaacccuuaauaugacaaugccucuguccugcaccaagaacaauucucaucacuauauucggguuggcaacgagacagggcucgagcugacccuuacgaauaccagcauccugaaccauaaauuuuguaaucucuccgacgcgcacaagcgcaaccuguacgaucauucucugaugagcauuaucuccacauuccaccucagcauuccgaauuuuaaccaguaugaagcuaugucuugcgacuucaauggaggcaaaaucaccgugcaguacaaccugucccacagcuuugccgucgaugccgcuggccauugugggacacuugccaauggagugcugcaaaccuucaugagaauggcuuggggcgggucuuauauugcccucgacuccggacggggcaacugggauugcaucaugacgagcuaccaguaccugaucauucagaacacaaccugggacgaucacugucaguuuucucgccccuccccuaucggguaucuuggacugcucagccaaagaacacgggacauuuacaucucccgcagacugcugggcaccuucaccuggacacucucugauagcgagggcaaugaaacgcccgggggauauugccugacccgguggaugcuuauugaggcggagcugaaguguuuuggcaacacagccguugcuaagugcaaugaaaaacaugacgaggaguucugugauaugcuccgccuguuugacuucaacaagcaggccaucagacggcuuaaaaccgaagcucagauguccauccagcugauuaauaaggccgugaacgcgcucaucaaugaucaacugauuaugaaaaaccaucugcgcgacaucauggggauuccuuacugcaauuauagcagauacugguaucucaaccacacaucuaccggaaagacgucccugccccggugcuggcuuaucagcaauggcucuuaccugaacgaaacaaaguucagcgacgauaucgagcagcaggccgacaauaugauuaccgagaugcuccaaaaagaauacaucgaucgccaggggaagaccccucugggacuggucgaccuuuuuguguucuccacaucuuuuuaucucauuagcaucuuccugcaccuggugaaaauuccgugaggacuaguuauaagacugacuagcccgaugggccucccaacgggcccuccuccccuccuugcaccgagauuaaucaaaggcucuuuucagagccaccaaaaaaaaaaaaaaaaaaaaaaaaaaaaaaaaaaaaaaaaaaaaaaaaaaaaaaaaaaaaaaaaagaauu

SEQ ID NO: 43017 - RNA, 1544 nt, Artificial Sequence
  mRNA product Design i-3 (hSL-A64-N5) comprising derived and/or modified sequence from LASV(AV;Clade V)__CCA30314__GPCmut13 (opt5)
aggagaaagcuuaccaugggccagaucgugaccuucuuucaagaggucccccacguuauugaagaggugaugaacaucgugcugauugcccucagcauccuggcuguccuuaaggggcuguacaauauugccacaugcggacucaucggccugaucacguuccuucugcucugugggagauccugcucuagcaaccuguauaaaggaguguacgaacugcagucccucgaccugaauauggagacccuuaacaugacaaugccucugucuuguaccaagaauaacagccaucacuauauucggguuggcaaugauacagggcucgaacugacccuuacaaacaccuccauccugaaucauaaauuuugcaaccucucugacgcgcacaagaaagaucuguacgaccaugcucugaugagcauuaucuccacguuccaccucagcauuccgaauuuuaaccaguaugaggccaugucuugugauuucaauggaggcaagaucuccgugcaguacaaccugagccacucuuaugccauugacgcugccaaucauugcggcaccgucgcuaacgggauccuucaaacauuuaugcgcauggccuggggaggcuccuacaucgcgcuggauagcgggagaggaaacugggacuguauuaugaccucuuaccaguaucucaucauucagaauacaaccugggagaaccacugccaguucucccggcccagcccuaucggcuaccuggggcuucugucccaacgcacgagagauauuuauaucucucggcgccuccugggaacauuuaccuggacacugagcgacuccgaaggcaaugccacccccggcggguacugucucaccagauggaugcugaucgaggcugaacuuaagugcuucggaaacacagccguggcuaaauguaaugagaagcaugaugaggaauuuugcgacaugcugcgccucuucgauuuuaacaaacaggccauuagccggcugaagucugaggcgcagauguccauccagcuuauuaauaaagccguuaacgcucugaucaaugaccaacucauuaugaagaaccaccugagagacaucaugggcaucccuuauugcaauuacagcaaguauugguaccugaaccacacgauuaccgggaaaacaucucuccccaaguguuggcuggugagcaauggauccuaccuuaacgaaacccauuucucugaugacaucgagcagcaggccgauaauaugauuacagaaaugcugcaaaaagaguauauggagcggcagggcaagaccccucucgggcuggucgaccuguucguguuuagcacguccuucuaccuuaucagcauuuuucuccgccuggugaaaaucccgugaggacuaguuauaagacugacuagcccgaugggccucccaacgggcccuccuccccuccuugcaccgagauuaaucaaaggcucuuuucagagccaccaaaaaaaaaaaaaaaaaaaaaaaaaaaaaaaaaaaaaaaaaaaaaaaaaaaaaaaaaaaaaaaaagaauu

SEQ ID NO: 43018 - RNA, 1541 nt, Artificial Sequence
  mRNA product Design i-3 (hSL-A64-N5) comprising derived and/or modified sequence from LASV(Togo/2016/7082;Clade VI)__AMR44577__GPCmut13 (opt5)
aggagaaagcuuaccaugggccagaucauuaccuucuuucaagaggugccccacgucaucgaagagguuaugaacauugugcugaucgcccucagccugcuugcuauucugaaggggguguacaaugucgccacaugcggaaucaucggccucgugacguuccuguuucuuugugggagauccugcucucugauuuauaaaggaagcuacgaacuccagacccuggagcugaacauggaaacacucaauaugaccaugccucuguccuguacaaagaacucuagccaucacuauauccggguuggcaaugagaccgggcuugagcugacacucaccaacacguccauuaucaaucauaaauucugcaaccugucugacgcgcacaagcgcaaucuuuacgaucaugcucugaugagcauucucuccaccuuucaccugagcaucccgaacuucaaucaguaugaagccaugucuugugacuuuaacggaggcaaaauuuccgugcaguacaaucugagccacgccuaugcugucgaugccgcugagcauugcggcacaguggccaacgggguucuccaaaccuucaugagaauggcguggggaggcucuuacaucgcccuggacuccgggcggggaaauugggauuguaucaugacaagcuaccaguaucuuauuauccagaacaccacgugggaagaccacugccaguuuucucgccccuccccuauuggcuaccuggggcuccugagccaaagaacacgggauaucuauauuucccgcagacuucugggaaccuucacauggacccucucugacagcgagggcaacgagacccccggcggguacugucugacacgguggaugcugaucgaagcugagcucaagugcuuuggaaauacggccguggcuaaguguaacgaaaaacaugaugaggaguucugcgacaugcugcgccuuuuugauuucaauaagcaggccauccagagacugaaauccgaagcgcagaugagcauucaacucaucaacaaggccgucaaugcucugauuaacgaccagcuuaucaugaaaaaucaucugcgggauaugaugggcauuccuuauugcaacuacucuaaguauugguaccucaaucacaccuccagcgggcgcacaucucugcccaaguguuggcuggugagcaacggauccuaccucaaugagacccacuucucugacgacaucgaacagcaagccgauaacaugaucacagagaugcugcagaaagaauauauugacagacagggcaagaccccucuugggcugguggaucucuuugucuucagcacguccuuuuaccugaucagcauuuuccugcaccuuaucaaaauuccgugaggacuaguuauaagacugacuagcccgaugggccucccaacgggcccuccuccccuccuugcaccgagauuaaucaaaggcucuuuucagagccaccaaaaaaaaaaaaaaaaaaaaaaaaaaaaaaaaaaaaaaaaaaaaaaaaaaaaaaaaaaaaaaaaagaauu

SEQ ID NO: 43019 - RNA, 1541 nt, Artificial Sequence
  mRNA product Design i-3 (hSL-A64-N5) comprising derived and/or modified sequence from LASV(KAK-428;Clade n.d. (VII))__ANH09740__GPCmut13 (opt5)
aggagaaagcuuaccaugggccagaucgugaccuucuuucaagaggucccccacguuauugaagaggugaugaacaucgugcugauugcccucagccugcuugcuauccugaaggggcucuacaauuucgccacaugcggagucauuggccugaucacguuucuucugcucugugggagauccugcucugcgaccuauaaaggacaguacgaacugcagacacuggagcucaacauggaaagccugaauaugaccaugccucuuuccuguacaaagaacaauucucaucacuauauccgggcuggcaacaauaccgggcuggagcucacacugaccaacacgagcauuaucucccauaaauucugcaaucuuucugacgcccacaagaaaaaccuguacgaucauacccucaugagcauuaucacaaccuuucaccuguccauuccgaauuucaaccaguaugaggccaugagcugugacuuuaauggaggcaagaucucuauucaauacaaccugucccacagcuaugcuggcgaugccgcucagcauugcgggacaguggccaauggaguucuccagaccuucaugcgcauggcguggggcgggucuuaccuggcccuugacuccggaagacggggcugggauuguaucaucagcucuuaccaguaucugauuauccaaaacacgacaugggacgaucacugccaguuuucccgccccagcccuauuggguaccucggauucgugucccagaagaccagagacaucuauauuucucggcgccugcuuggcacauuuaccuggacccugagcgauuccgaaggccaugacaugcccgggggauacugucucacaagauggaugcugaucgaggcugaucugaaaugcuucggcaacacggccgucgcuaaguguaaugaaaaacacgacgaggaguuuugcgauauguggcgccucuucgacuucaacaagcaggccauccaacggcugaaagcggaagcccagaugaauauucagcuuaucaacaaggcugugaaugcccugauuaacgaccaacucaugaugaagaaucaccugagagauaucauggggauuccuuauugcaacuacagcaaauuuugguaucuuaauaacaccacaaccggacggacaucucugccccgcuguuggcucaucuccaauggcagcuaccugaacgagacccauuucucugacgauaucgaacagcaggcugacaauaugauuacggagaugcugcagaaggaauacauggauagacaagggaaaacaccucucggacugguugaccuuuuuguguucagcaccuccuuuuaucugaucaccauuuuccuccaccuggucaagaucccgugaggacuaguuauaagacugacuagcccgaugggccucccaacgggcccuccuccccuccuugcaccgagauuaaucaaaggcucuuuucagagccaccaaaaaaaaaaaaaaaaaaaaaaaaaaaaaaaaaaaaaaaaaaaaaaaaaaaaaaaaaaaaaaaaagaauu

SEQ ID NO: 43020 - RNA, 1541 nt, Artificial Sequence; identical to SEQ ID NO: 43014
  mRNA product Design i-3 (hSL-A64-N5) comprising derived and/or modified sequence from LASV(Pinneo-NIG-1969;Clade I)__AIT17836__GPCmut13 (opt5)

SEQ ID NO: 43021 - RNA, 1541 nt, Artificial Sequence
  mRNA product Design i-3 (hSL-A64-N5) comprising derived and/or modified sequence from LASV(ISTH0009-NIG-2011;Clade II)__AIT17404__GPCmut13 (opt5)
aggagaaagcuuaccaugggccagaucauuaccuucuuucaagaggugccccacgucaucgaagagguuaugaacauugugcugaucgcccucagccugcuugcuauucugaaggggaucuacaauguggccacaugcggacucuucggccuggucuccuuucuucugcucugugggagaucuugcagcacgaccuauaaaggaguguacgaacugcagacacuggagcucgacauggcgucccugaacaugaccaugccucuuucuuguacaaagaauaacagccaucacuauaucaugguuggcaaugaaaccgggcuggagcucacacugaccaacacguccauuaucaaucauaaauucugcaaccuuucugaugcucacaagaaaaaucuguacgaccaugcccucaugagcauuaucuccaccuuucaccugagcauuccgaacuucaaucaguaugaggccaugucuugugauuuuaacggaggcaagaucuccgugcaguacaaucugagccacgcuuaugccgucgacgcugccaaccauugcggcacaauugcgaauggggugcuccaaaccuucaugcggauggccuggggaggcucuuacaucgcucuggauuccgggaagggaagcugggacuguaucaugacaucuuaccaguaucuuauuauccagaacaccacgugggaagaucacugccaguuuucccgccccagcccuauuggcuaccuggggcuccugucccaaagaacacgggacaucuauauuucucgcagacuucugggaaccuucacauggacccucagcgauuccgagggcaacgaaacccccggcggguacugucugacacgguggaugcugaucgaggccgagcucaaaugcuuuggaaauacggcuguugccaaguguaacgaaaaacaugacgaggaguucugcgauaugcugcgccuuuuugacuucaauaagcaggcgaucagacggcugaaaaccgaagcccagaugagcauucagcucaucaacaaggcugugaaugcccugauuaacgaucaacuuaucaugaagaaucaucugcgcgacauuaugggcaucccuuauugcaacuacucuaaauauugguaccucaaucacacagucaccgggaagacaucccugcccagauguuggcuggugagcaacggaucuuaccucaaugaaacccacuucagcgacgauaucgagcagcaggcugacaacaugauuacggagcugcuucaaaaagaauauauggaucggcagggcaagacaccucuggggcucguggaccuguuugucuucuccaccucuuuuuaccugaucagcauuuuccuucaccucaucaaaauuccgugaggacuaguuauaagacugacuagcccgaugggccucccaacgggcccuccuccccuccuugcaccgagauuaaucaaaggcucuuuucagagccaccaaaaaaaaaaaaaaaaaaaaaaaaaaaaaaaaaaaaaaaaaaaaaaaaaaaaaaaaaaaaaaaaagaauu

SEQ ID NO: 43022 - RNA, 1541 nt, Artificial Sequence
  mRNA product Design i-3 (hSL-A64-N5) comprising derived and/or modified sequence from LASV(ISTH2010-NIG-2012;Clade II)__AIT17482__GPCmut13 (opt5)
aggagaaagcuuaccaugggccagaucauuaccuucuuucaagaggugccccacgucaucgaagagguuaugaacauugugcugaucgcccucagccugcuugcuauucugaaggggaucuacaauguggccacaugcggacucuucggccuggucuccuuucuucugcucugugggagaucuugcagcacgaccuauaaaggaguguacgaacugcagacacuggagcucgacauggcgucccugaacaugaccaugccucuuucuuguacaaagaauaacagccaucacuauaucaugguuggcaaugaaaccgggcuggagcucacacugaccaacacguccauuaucaaucauaaauucugcaaccuuucugaugcucacaagaaaaaucuguacgaccaugcccucaugagcauuaucuccaccuuucaccugagcauuccgaacuucaaucaguaugaggccaugucuugugauuuuaacggaggcaagaucuccgugcaguacaaucugagccacgcuuaugccgucgacgcugccaaccauugcggcacaauugcgaauggggugcuccaaaccuucaugcggauggccuggggaggcucuuacaucgcucuggauuccgggaagggaagcugggacuguaucaugacaucuuaccaguaucuuauuauccagaacauuaccugggaagaucacugccaguuuucccgccccagcccuaucggcuaccuggggcuccugucccaaagaacgcgggacauuuauaucucucgcagacuucugggaacauucaccuggacacucagcgauuccgagggcaacgaaacccccggcggguacugucugacccgguggaugcugaucgaggccgagcucaaaugcuuuggaaauacagcuguugccaaguguaacgaaaaacaugacgaggaguucugcgauaugcugcgccuuuuugacuucaauaagcaggcgauuagacggcugaaaacggaagcccagaugagcauccagcucauuaacaaggcugugaaugcccugaucaacgaucaacuuauuaugaagaaucaucugcgcgacaucaugggcaucccuuauugcaacuacucuaaauauugguaccucaaucacaccgucacagggaagaccucccugcccagauguuggcuggugagcaacggaucuuaccucaaugaaacacacuucagcgacgauauugagcagcaggcugacaacaugaucaccgagcugcuucaaaaagaauauauugaucggcagggcaagacgccucuggggcucguggaccuguuugucuucuccacaucuuuuuaccugaucagcauuuuccuucaccucguuaaaaucccgugaggacuaguuauaagacugacuagcccgaugggccucccaacgggcccuccuccccuccuugcaccgagauuaaucaaaggcucuuuucagagccaccaaaaaaaaaaaaaaaaaaaaaaaaaaaaaaaaaaaaaaaaaaaaaaaaaaaaaaaaaaaaaaaaagaauu

SEQ ID NO: 43023 - RNA, 1541 nt, Artificial Sequence
  mRNA product Design i-3 (hSL-A64-N5) comprising derived and/or modified sequence from LASV(Lassa virus/H.sapiens-wt/NGA/2015/ISTH_0543;Clade II)__AVO03639__GPCmut13 (opt5)
aggagaaagcuuaccaugggccagaucauuaccuucuuucaagaggugccccacgucaucgaagagguuaugaacauugugcugaucgcccucagccugcuugcuauucugaaggggaucuacaauguggccacaugcggacucuucggccuggucuccuuucuucugcucugugggagaucuugcagcacgaccuauaaaggaguguacgaacugcagacacuggagcucgacauggcgaaccugaauaugaccaugccucuuuccuguacaaagaacaauucucaucacuauaucaugguuggcaacgaaaccgggcuggagcucacacugaccaauacgagcauuaucaaccauaaauucugcaaucuuuccgaugcucacaagaaaaaccuguacgaccaugcccucaugucuauuaucagcaccuuucaccuguccauuccgaauuucaaccaguaugaggccaugagcugugauuuuaauggaggcaagaucucugugcaguacaaccugucccacacauaugcugucgacgccgcuaaucauugcggcaccauugccaacggggugcuccaaacauucaugcggauggcguggggaggcagcuacaucgcccuggauucugggaagggauccugggacuguaucaugaccagcuaccaguaucuuguuauucagaacacgacaugggaagaucacugccaguuuucucgccccuccccuaucggcuaccuggggcuccugagccaaagaacccgggacauuuauaucucccgcagacuucugggaacauucaccuggacccucucugauagcgagggcaaugaaacacccggcggguacugucugacgcgguggaugcugauugaggcugagcucaaaugcuuuggaaacaccgccguggcuaaguguaaugaaaaacaugacgaggaguucugcgauaugcugcgccuuuuugacuucaacaagcaggccaucagacggcugaaaacagaagcgcagauguccauccagcucauuaauaaggccgucaacgcucugaucaaugaucaacuuauuaugaagaaccaucugcgcgacaucaugggcauuccuuauugcaauuacagcaaauauugguaccucaaccacaccgugacagggaagaccucucugcccagauguuggcugguguccaauggaagcuaccucaacgaaacgcacuucucugacgauaucgagcagcaggccgacaauaugaucacagagcugcuucaaaaagaauauauugaucggcagggcaagaccccucuggggcucgucgaccuguuuguuuucagcaccuccuuuuaccugaucucuauuuuccuucaccucgugaaaaucccgugaggacuaguuauaagacugacuagcccgaugggccucccaacgggcccuccuccccuccuugcaccgagauuaaucaaaggcucuuuucagagccaccaaaaaaaaaaaaaaaaaaaaaaaaaaaaaaaaaaaaaaaaaaaaaaaaaaaaaaaaaaaaaaaaagaauu

SEQ ID NO: 43024 - RNA, 1541 nt, Artificial Sequence
  mRNA product Design i-3 (hSL-A64-N5) comprising derived and/or modified sequence from LASV(Lassa virus/H.sapiens-wt/NGA/2016/ISTH_0009;Clade II)__AVO03571__GPCmut13 (opt5)
aggagaaagcuuaccaugggccagaucauuaccuucuuucaagaggugccccacgucaucgaagagguuaugaacauugugcugaucgcccucagccugcuugcuauucugaaggggaucuacaauguggccacaugcggacuccugggccuugucuccuuccugcuccugugugggagaucuugcagcacgaccuauaaaggaguguacgaacugcagacacucgagcuggacauggcgucccuuaacaugaccaugccucugucuuguacaaagaauaacagccaucacuauaucaugguuggcaaugaaaccgggcucgagcugacacuuaccaacacguccauuaucaaucauaaauuuugcaaccugucugaugcucacaagaaaaaucucuacgaccaugcccugaugagcauuaucuccaccuuccaccugagcauuccgaacuuuaaucaguaugaggccaugucuugugauuucaacggaggccggaucuccgugcaguacaaucucagccacucuuaugcugucgacgccgcuaaccauugcggcacaauugccaauggggugcugcaaaccuuuaugcgcauggcguggggaggcuccuacaucgcccuugauagcgggaagggaucuugggacuguaucaugacauccuaccaguaucugauuauccagaacaccacgugggaagaucacugccaguucagcagacccuccccuauuggcuaccucgggcugcuuucucaacggacacgcgacaucuauauuagcagacggcugcucggaaccuuuacauggacccuguccgauagcgagggcaacgaaacccccggcggguacugucugacacgcuggaugcucaucgaggcugagcugaagugcuucggaaauacggccguugcuaaauguaacgaaaagcaugacgaggaauuuugcgauaugcuuagacuguucgacuuuaauaaacaggccauccggcgccucaagaccgaggcgcagaugucuauucagcugaucaacaaagccgugaaugcucuuauuaacgaucaacugaucaugaagaaucaccucagagacauuaugggcaucccuuauugcaacuacuccaaguauugguaccugaaucacacagucaccgggaaaacaagccugccccgguguuggcucgugucuaacggaagcuaccugaaugaaacccauuucuccgacgauaucgagcagcaggccgacaacaugauuacggagcuucugcaaaaggaauauaucgaucgccagggcaaaacaccucucgggcugguggaccuguucgucuuuucuaccagcuucuaccuuauuuccaucuuucuccaccugguuaagauuccgugaggacuaguuauaagacugacuagcccgaugggccucccaacgggcccuccuccccuccuugcaccgagauuaaucaaaggcucuuuucagagccaccaaaaaaaaaaaaaaaaaaaaaaaaaaaaaaaaaaaaaaaaaaaaaaaaaaaaaaaaaaaaaaaaagaauu

SEQ ID NO: 43025 - RNA, 1541 nt, Artificial Sequence
  mRNA product Design i-3 (hSL-A64-N5) comprising derived and/or modified sequence from LASV(Lassa virus/H.sapiens-wt/NGA/2016/ISTH_0017;Clade II)__AVO03567__GPCmut13 (opt5)
aggagaaagcuuaccaugggccagaucauuaccuucuuucaagaggugccccacgucaucgaagagguuaugaacauugugcugaucgcccucagccugcuugcuauucugaaggggaucuacaauguggccacaugcggacucuucggccuggucuccuuucuucugcucugugggagaucuugcagcacgaccuauaaaggaguguacgaacugcagacacuggagcucgacauggcgucccugaacaugaccaugccucuuucuuguacaaagaauaacagccaucacuauaucaugguuggcaaugaaaccgggcuggagcucacacugaccaacacguccauuaucaaucauaaauucugcaaccuuucugaugcucacaagaaaaaucuguacgaccaugcccucaugagcauuaucuccaccuuucaccugagcauuccgaacuucaaucaguaugaggccaugucuugugauuuuaacggaggcaagaucuccgugcaguacaaucugagccacacauaugcuauugacgccgcuaaccauugcggcaccaucgccaaugggguccuccaaacauucaugcggauggcguggggaggcucuuacaucgcccuggauuccgggaagggaagcugggacuguauuaugaccucuuaccaguaucuuaucauucagaacacgacaugggaagaucacugccaguuuucccgccccagcccuaucggcuaccuggggcuccugucccaaagaacccgggacauuuauaucucucgcagacuucugggaacauucaccuggacccucagcgauuccgagggcaacgaaacacccggcggguacugucugacgcgguggaugcugaucgaggcugagcucaaaugcuuuggaaauaccgccguggcuaaguguaacgaaaaacaugacgaggaguucugcgauaugcugcgccuuuuugacuucaauaagcaggccauuagacggcugaaaacagaagcgcagaugagcauccagcucauuaacaaggccguuaaugcucugaucaacgaucaacuuauuaugaagaaucaucugcgcgacaucaugggcaucccuuauugcaacuacucuaaauauugguaccucaaucacaccgugacagggaagaccucccugcccagauguuggcuggucagcaacggaucuuaccucaaugaaacgcacuucagcgacgauauugagcagcaggccgacaacaugaucacagagcugcuucaaaaagaauauauggaucggcagggcaagaccccucuggggcucguggaccuguuuguguucuccaccucuuuuuaccugauuagcaucuuccuucaccucguccgcauuccgugaggacuaguuauaagacugacuagcccgaugggccucccaacgggcccuccuccccuccuugcaccgagauuaaucaaaggcucuuuucagagccaccaaaaaaaaaaaaaaaaaaaaaaaaaaaaaaaaaaaaaaaaaaaaaaaaaaaaaaaaaaaaaaaaagaauu

SEQ ID NO: 43026 - RNA, 1541 nt, Artificial Sequence
  mRNA product Design i-3 (hSL-A64-N5) comprising derived and/or modified sequence from LASV(Lassa virus/H.sapiens-wt/NGA/2018/ISTH_0959;Clade II)__AVV65099__GPCmut13 (opt5)
aggagaaagcuuaccaugggccagaucauuaccuucuuucaagaggugccccacgucaucgaagagguuaugaacauugugcugaucgcccucagccugcuugcuauucugaaggggaucuacaauguggucacaugcggacucuucggccugguguccuuucuucugcucugugggagaucuugcagcacgaccuauaaaggaguuuacgaacugcagacacuggagcucgacauggccucccugaacaugaccaugccucuuucuuguacaaagaauaacagccaucacuauaucauggugggcaaugaaaccgggcuggagcucacacugaccaacacguccauuaucaaucauaaauucugcaaccuuucugaugcgcacaagaaaaaucuguacgaccaugcucucaugagcauuaucuccaccuuucaccugagcauuccgaacuucaaucaguaugaggccaugucuugugauuuuaacggaggcaagaucuccguccaguacaaucugagccacgccuaugcuauugacgccgcuaaccauugcggcacaaucgccaauggggugcuccaaaccuucaugcggauggcguggggaggcucuuacaucgcccuggauuccgggaagggaagcugggacuguauuaugacaucuuaccaguaucuuaucauucagaacaccacgugggaagaucacugccaguuuucccgccccagcccuaucggcuaccuggggcuccugucccaaagaacacgggacauuuauaucucucgcagacuucugggaaccuucacauggacccucagcgauuccgagggcaacgaaacccccggcggguacugucugacacgguggaugcugaucgaggcugagcucaaaugcuuuggaaauacggccguugcuaaguguaacgaaaaacaugacgaggaguucugcgauaugcugcgccuuuuugacuucaauaagcaggccauuagacggcugaaaaccgaagcgcagaugagcauccagcucauuaacaaggccgugaaugcucugaucaacgaucaacuuauuaugaagaaucaucugcgcgacaucaugggcaucccuuauugcaacuacucuaaauauugguaccucaaucacacagucaccgggaagacaucccugcccagauguuggcuggugagcaacggaucuuaccucaaugaaacccacuucagcgacgauauugagcagcaggccgacaacaugaucacggagcugcuucaaaaagaauauauugaucggcagggcaagacaccucuggggcucguggaccuguuugucuucuccaccucuuuuuaccugaucagcauuuuccuucaccucguuaaaaucccgugaggacuaguuauaagacugacuagcccgaugggccucccaacgggcccuccuccccuccuugcaccgagauuaaucaaaggcucuuuucagagccaccaaaaaaaaaaaaaaaaaaaaaaaaaaaaaaaaaaaaaaaaaaaaaaaaaaaaaaaaaaaaaaaaagaauu

SEQ ID NO: 43027 - RNA, 1541 nt, Artificial Sequence
  mRNA product Design i-3 (hSL-A64-N5) comprising derived and/or modified sequence from LASV(LASV003-NIG-2008;Clade II)__AIT17580__GPCmut13 (opt5)
aggagaaagcuuaccaugggccagaucauuaccuucuuucaagaggugccccacgucaucgaagagguuaugaacauugugcugaucgcccucagccugcuugcuauucugaaggggaucuacaauguggccacaugcggacucuucggccuggucuccuuucuucugcucugugggagaucuugcagcacgaccuauaaaggaguguacgaacugcagacacuggagcucgacauggcgucccugaacaugaccaugccucuuucuuguacaaagaauaacagccaucacuauaucaugguuggcaaugaaaccgggcuggagcucacacugaccaacacguccauuaucaaucauaaauucugcaaccuuucugaugcucacaagaaaaaucuguacgaccaugcccucaugagcauuaucuccaccuuucaccugagcauuccgaacuucaaucaguaugaggccaugucuugugauuuuaacggaggcaagaucuccgugcaguacaaucugagccacacauaugcugucgacgccgcuaaccauugcggcaccauugccaauggggugcuccaaacauucaugcggauggcguggggaggcucuuacaucgcccuggauuccgggaagggaagcugggacuguaucaugaccucuuaccaguaucuuauuauccagaacacgacaugggaagaucacugccaguuuucccgccccagcccuauuggcuaccuggggcuccugucccaaagaacccgggacaucuauauuucucgcagacuucugggaacauucaccuggacccucagcgauuccgagagcaacgaaacacccggcggcuacugucugacgcgguggaugcugaucgaggcugagcucaaaugcuuugggaauaccgccguugcuaaguguaacgaaaaacaugacgaggaguucugcgauaugcugcgccuuuuugacuucaauaagcaggccaucagacggcugaaagcggaagcccagaugucuauucagcucaucaacaaggcugugaaugcccugauuaacgaucaacuuaucaugaagaaucaucugcgcgacauuaugggaaucccuuauugcaacuacuccaaauauugguaccucaaucacacagucaccggcagaacaagccugccccgguguuggcuggugucuaacgggagcuaccucaaugaaacccacuucuccgacgauaucgagcagcaggcugacaacaugauuacggagcugcuucaaaaggaauauauggaucgccagggaaaaacaccucugggccucguggaccuguuugucuucucuaccagcuuuuaccugaucuccauuuuccuucaccucguuaagaucccgugaggacuaguuauaagacugacuagcccgaugggccucccaacgggcccuccuccccuccuugcaccgagauuaaucaaaggcucuuuucagagccaccaaaaaaaaaaaaaaaaaaaaaaaaaaaaaaaaaaaaaaaaaaaaaaaaaaaaaaaaaaaaaaaaagaauu

SEQ ID NO: 43028 - RNA, 1541 nt, Artificial Sequence
  mRNA product Design i-3 (hSL-A64-N5) comprising derived and/or modified sequence from LASV(LASV035-NIG-2009;Clade II)__AIT17588__GPCmut13 (opt5)
aggagaaagcuuaccaugggccagaucauuaccuucuuucaagaggugccccacgucaucgaagagguuaugaacauugugcugaucgcccucagccugcuugcuauucugaaggggaucuacaauguggccacaugcggacucuucggccuggucuccuuucuucugcucugugggagaucuugcagcacgaccuauaaaggaguguacgaacugcagacacuggagcucgacauggcgucccugaacaugaccaugccucuuucuuguacaaagaauaacagccaucacuauaucaugguuggcaaugaaaccgggcuggagcucacacugaccaacacguccauuaucaaucauaaauucugcaaccuuucugaugcucacaagaaaaaucuguacgaccaugcccucaugagcauuaucuccaccuuucaccugagcauuccgaacuucaaucaguaugaggccaugucuugugauuuuaacggaggcaagaucuccgugcaguacaaucugagccacgcuuaugccgucgacgcugccaaccauugcggcacaauugcgaauggggugcuccaaaccuucaugcggauggccuggggaggcucuuacaucgcucuggauuccgggaagggaagcugggacuguaucaugacaucuuaccaguaucuuauuauccagaacaccacgugggaagaucacugccaguuuucccgccccagcccuauuggcuaccuggggcuccugucccaaagaacacgggacaucuauauuucucgcagacuucugggaaccuucacauggacccucagcgauuccgagggcaacgaaacccccggcggguacugucugacacgguggaugcugaucgaggccgagcucaaaugcuuuggaaauacggcuguugccaaguguaacgaaaaacaugacgaggaguucugcgauaugcugcgccuuuuugacuucaauaagcaggcgaucagacggcugaaagccgaagcucagaugagcauucagcucaucaacaaggccgugaaugcucugauuaacgaucaacuuaucaugaagaaucaucugcgcgacauuaugggcaucccuuauugcaacuacucuaaauauugguaccucaaucacaccgucacagggaagaccucccugcccagauguuggcuggugagcaacggaucuuaccucaaugaaacacacuucagcgacgauaucgagcagcaggccgacaacaugauuaccgagcugcuucaaaaagaauauaucgaucggcagggcaagacgccucuggggcucguggaccuguuugucuucuccacaucuuuuuaccugauuagcaucuuccuucaccucguuaaaauuccgugaggacuaguuauaagacugacuagcccgaugggccucccaacgggcccuccuccccuccuugcaccgagauuaaucaaaggcucuuuucagagccaccaaaaaaaaaaaaaaaaaaaaaaaaaaaaaaaaaaaaaaaaaaaaaaaaaaaaaaaaaaaaaaaaagaauu

SEQ ID NO: 43029 - RNA, 1541 nt, Artificial Sequence
  mRNA product Design i-3 (hSL-A64-N5) comprising derived and/or modified sequence from LASV(LASV1000-NIG-2009;Clade II)__AIT17782__GPCmut13 (opt5)
aggagaaagcuuaccaugggccagaucauuaccuucuuucaagaggugccccacgucaucgaagagguuaugaacauugugcugaucgcccucagccugcuugcuauucugaaggggaucuacaauguggccacaugcggacucuucggccuggucuccuuucuucugcucugugggagaucuugcagcacgaccuauaaaggaguguacgaacugcagacacuggagcucgacauggcgucccugaacaugaccaugccucuuucuuguacaaagaauaacagccaucacuauaucaugguuggcaaugaaaccgggcuggagcucacacugaccaacacguccauuaucaaucauaaauucugcaaccuuucugaugcucacaagaaaaaucuguacgaccaugcccucaugagcauuaucuccaccuuucaccugagcauuccgaacuucaaucaguaugaggccaugucuugugauuuuaacggaggcaagaucuccgugcaguacaaucugagccacacauaugcugucgacgccgcuaaccauugcggcaccauugccaauggggugcuccaaacauucaugcggauggcguggggaggcucuuacaucgcccuggauuccgggaagggaagcugggacuguaucaugaccucuuaccaguaucuuauuauccagaacacgacaugggaagaucacugccaguuuucccgccccagcccuauuggcuaccuggggcuccugucccaaagaacccgggacaucuauauuucucgcagacuucugggaacauucaccuggacccucagcgauuccgagggcaacgaaacacccggcggguacugucugacgcgguggaugcugaucgaggcugagcucaaaugcuuuggaaauaccgccguugcuaaguguaacgaaaaacaugacgaggaguucugcgauaugcugcgccuuuuugacuucaauaagcaggccaucaaaagacugaagacagaagcgcagaugagcauucagcucaucaacaaggccgugaaugcucugauuaacgaucaacuuaucaugaaaaaucaucugcgggacauuaugggcaucccuuauugcaacuacucuaaguauugguaccucaaucacaccgucacagggaaaaccucccugccccgcuguuggcuggugagcaacggaucuuaccucaaugaaacgcacuucagcgacgauaucgagcagcaggccgacaacaugauuacagagcugcuucaaaaggaauauaucgauagacagggcaaaaccccucuggggcucguggaccuguuugucuucuccaccucuuuuuaccugauuagcaucuuccuucaccucguuaagauuccgugaggacuaguuauaagacugacuagcccgaugggccucccaacgggcccuccuccccuccuugcaccgagauuaaucaaaggcucuuuucagagccaccaaaaaaaaaaaaaaaaaaaaaaaaaaaaaaaaaaaaaaaaaaaaaaaaaaaaaaaaaaaaaaaaagaauu

SEQ ID NO: 43030 - RNA, 1541 nt, Artificial Sequence
  mRNA product Design i-3 (hSL-A64-N5) comprising derived and/or modified sequence from LASV(LASV221-NIG-2010;Clade II)__AIT17624__GPCmut13 (opt5)
aggagaaagcuuaccaugggccagaucauuaccuucuuucaagaggugccccacgucaucgaagagguuaugaacauugugcugaucgcccucagccugcuugcuauucugaaggggaucuacaauguggccacaugcggacucuucggccuggucuccuuucuucugcucugugggagaucuugcagcacgaccuauaaaggaguguacgaacugcagacacuggagcucgacauggcgucccugaacaugaccaugccucuuucuuguacaaagaauaacagccaucacuauaucaugguuggcaaugaaaccgggcuggagcucacacugaccaacacguccauuaucaaucauaaauucugcaaccuuucugaugcucacaagaaaaaucuguacgaccaugcccucaugagcauuaucuccaccuuucaccugagcauuccgaacuucaaucaguaugaggccaugucuugugauuuuaacggaggcaagaucuccgugcaguacaaucugagccacacauaugcuauugacgccgcuaaccauugcggcaccaucgccaaugggguccuccaaacauucaugcggauggcguggggaggcucuuacaucgcccuggauuccgggaagggaagcugggacuguauuaugaccucuuaccaguaucuuaucauucagaacacgacaugggaagaucacugccaguuuucccgccccagcccuaucggcuaccuggggcuccugucccaaagaacccgggacauuuauaucucucgcagacuucugggaacauucaccuggacccucagcgauuccgagggcaacgaaacacccggcggguacugucugacgcgguggaugcugaucgaggcugagcucaaaugcuuuggaaauaccgccguggcuaaguguaacgaaaaacaugacgaggaguucugcgauaugcugcgccuuuuugacuucaauaagcaggccauuagacggcugaaaacagaagcgcagaugagcauccagcucauuaacaaggccguuaaugcucugaucaacgaucaacuuauuaugaagaaucaucugcgcgacaucaugggcaucccuuauugcaacuacucuaaauauugguaccucaaucacaccgugacagggaagaccucccugcccagauguuggcuggucagcaacggaucuuaccucaaugaaacgcacuucagcgacgauauugagcagcaggccgacaacaugaucacagagaugcugcaaaaagaauauauggaucggcagggcaagaccccucuugggcugguggaccucuuuguguucuccaccucuuuuuaccugauuagcaucuuccugcaccuugucaaaauuccgugaggacuaguuauaagacugacuagcccgaugggccucccaacgggcccuccuccccuccuugcaccgagauuaaucaaaggcucuuuucagagccaccaaaaaaaaaaaaaaaaaaaaaaaaaaaaaaaaaaaaaaaaaaaaaaaaaaaaaaaaaaaaaaaaagaauu

SEQ ID NO: 43031 - RNA, 1541 nt, Artificial Sequence
  mRNA product Design i-3 (hSL-A64-N5) comprising derived and/or modified sequence from LASV(LASV237-NIG-2010;Clade II)__AIT17638__GPCmut13 (opt5)
aggagaaagcuuaccaugggccagaucauuaccuucuuucaagaggugccccacgucaucgaagagguuaugaacauugugcugaucgcccucagccugcuugcuauucugaaggggaucuacaauguggccacaugcggacucuucggccuggucuccuuucuucugcucugugggagaucuugcagcacgaccuauaaaggaguguacgaacugcagacacuggagcucgacauggcgucccugaacaugaccaugccucuuucuuguacaaagaauaacagccaucacuauaucaugguuggcaaugaaaccgggcuggagcucacacugaccaacacguccauuaucaaucauaaauucugcaaccuuucugaugcucacaagaaagaccuguacgaucaugcccucaugagcauuaucuccaccuuucaccugagcauuccgaauuucaaccaguaugaggccaugucuugugacuuuaauggaggcaagaucuccgugcaguacaaccugagccacacauaugcugucgaugccgcuaaucauugcggcaccauugccaacggggugcuccaaacauucaugcggauggcguggggaggcucuuacaucgcccuggacuccgggaagggaagcugggauuguaucaugaccucuuaccaguaucuuauuauccagaauacgacaugggaagaccacugccaguuuucccgccccagcccuauuggcuaccuggggcuccugucccaaagaacccgggauaucuauauuucucgcagacuucugggaacauucaccuggacccucagcgacuccgagggcaacgaaacacccggcggguacugucugacgcgguggaugcugaucgaggcugagcucaaaugcuuuggaaacaccgccguugcuaaguguaaugaaaaacaugaugaggaguucugcgacaugcugcgccuuuuugauuucaacaagcaggccaucagacggcugaaaacagaagcgcagaugagcauucagcucaucaauaaggccgugaacgcucugauuaaugaccaacuuaucaugaagaaccaucugcgcgacauuaugggcaucccuuauugcaauuacucuaaauauugguaccucaaccacaccgucacagggaagaccucccugcccagauguuggcuggugagcaauggaucuuaccucaacgaaacgcacuucagcgaugacaucgagcagcaggccgauaauaugauuacagagcugcuucaaaaagaauauauggaccggcagggcaagaccccucuggggcucguggaucuguuugucuucuccaccucuuuuuaccugaucagcauuuuccuucaccucaucaaaauuccgugaggacuaguuauaagacugacuagcccgaugggccucccaacgggcccuccuccccuccuugcaccgagauuaaucaaaggcucuuuucagagccaccaaaaaaaaaaaaaaaaaaaaaaaaaaaaaaaaaaaaaaaaaaaaaaaaaaaaaaaaaaaaaaaaagaauu

SEQ ID NO: 43032 - RNA, 1541 nt, Artificial Sequence
  mRNA product Design i-3 (hSL-A64-N5) comprising derived and/or modified sequence from LASV(LASV253-NIG-2011;Clade II)__AIT17670__GPCmut13 (opt5)
aggagaaagcuuaccaugggccagaucauuaccuucuuucaagaggugccccacgucaucgaagagguuaugaacauugugcugaucgcccucagccugcuugcuauucugaaggggaucuacaauguggccacaugcggacucuucggccuggucuccuuucuucugcucugugggagaucuugcagcacgaccuauaaaggaguguacgaacugcagacacuggagcucgacauggcgucccugaacaugaccaugccucuuucuuguacaaagaauaacagccaucacuauaucaugguuggcaaugaaaccgggcuggagcucacacugaccaacacguccauuaucaaucauaaauucugcaaccuuucugaugcucacaagaaaaaucuguacgaccaugcccucaugagcauuaucuccaccuuucaccugagcauuccgaacuucaaucaguaugaggccaugucuugugauuuuaacggaggcaagaucuccgugcaguacaaucugagccacacauaugcugucgacgccgcuaaccauugcggcaccauugccaauggggugcuccaaacauucaugcggauggcguggggaggcucuuacaucgcccuggauuccgggaagggaagcugggacuguaucaugaccucuuaccaguaucuuauuauccagaacacgacaugggaagaucacugccaguuuucccgccccagcccuauuggcuaccuggggcuccugucccaaagaacccgggacaucuauauuucucgcagacuucugggaacauucaccuggacccucagcgauuccgagggcaacgaaacacccggcggguacugucugacgcgguggaugcugaucgaggcugagcucaaaugcuuuggaaauaccgccguugcuaaguguaacgaaaaacaugacgaggaguucugcgauaugcugcgccuuuuugacuucaauaagcaggccaucagacggcugaaagcggaagcccagaugagcauucagcucaucaacaaggcugugaaugcccugauuaacgaucaacuuaucaugaagaaucaucugcgcgacauuaugggcaucccuuauugcaacuacucuaaauauugguaccucaaucacacagucaccgggagaacaucccugccccgguguuggcuggugagcaacggaucuuaccucaaugaaacccacuucagcgacgauaucgagcagcaggcugacaacaugauuacggagcugcuucaaaaggaauauaucgaucgccagggcaaaacaccucuggggcucguggaccuguuugucuucuccaccucuuuuuaccugauuagcaucuuccuucaccucguuaagauuccgugaggacuaguuauaagacugacuagcccgaugggccucccaacgggcccuccuccccuccuugcaccgagauuaaucaaaggcucuuuucagagccaccaaaaaaaaaaaaaaaaaaaaaaaaaaaaaaaaaaaaaaaaaaaaaaaaaaaaaaaaaaaaaaaaagaauu

SEQ ID NO: 43033 - RNA, 1541 nt, Artificial Sequence
  mRNA product Design i-3 (hSL-A64-N5) comprising derived and/or modified sequence from LASV(LASV254-NIG-2011;Clade II)__AIT17674__GPCmut13 (opt5)
aggagaaagcuuaccaugggccagaucauuaccuucuuucaagaggugccccacgucaucgaagagguuaugaacauugugcugaucgcccucagccugcuugcuauucugaaggggaucuacaauguggccacaugcggacucuucggccuggucuccuuucuucugcucugugggagaucuugcagcacgaccuauaaaggaguguacgaacugcagacacuggagcucgacaugaccaaccugaauaugacaaugccucuuuccuguaccaagaacaauucucaucacuauaucaugguuggcaacgaaacagggcuggagcucacccugacgaauaccagcauuaucaaccauaaauucugcaaucuuuccgaugcgcacaagaaaaaccuguacaaucaugcucucaugucuauuaucagcacauuucaccuguccauuccgaacuucaaucaguaugaggccaugagcugugacuuuaacggaggcaagaucucugugcaguacaaucugucccacagcuaugccgucgaugcugccaaccauugcggcaccauugcuaacggggugcuccaaacauucaugcggauggccuggggaggcucuuacaucgcgcuggacuccgggaagggaaauugggauuguaucaugaccagcuaccaguaucuuauuauccagaacacgacaugggaagaccacugccaguuuucucgccccuccccuauuggcuaccuggggcuccugagccaaagaacccgggauaucuauauuucccgcagacuucugggaacauucaccuggacccucucugacagcgagggcaaugaaacacccggcggguacugucugacgcgguggaugcugaucgaggccgagcucaaaugcuuuggaaacaccgcuguugccaaguguaaugaaaaacaugaugaggaguucugcgacaugcugcgccuuuuugauuucaacaagcaggcuaucagacggcugaaaacagaagcccaggcgaauauucagcucaucaacaaggccgugaaugcucugauuaacgaccaacuuaucaugaagaaucaucugcgcgauauuaugggcaucccuuauugcaacuacuccaaauauugguaccucaaucacaccgucacagggaagaccagccugcccagauguuggcuggugucuaacggauccuaccucaaugaaacgcacuucagcgacgacaucgagcagcaggccgauaacaugauuacagagcugcuucaaaaagaauauauggaccggcagggcaagaccccucuggggcucguggaucuguuugucuucucuaccagcuuuuaccugaucuccauuuuccuucaccucguuaaaaucccgugaggacuaguuauaagacugacuagcccgaugggccucccaacgggcccuccuccccuccuugcaccgagauuaaucaaaggcucuuuucagagccaccaaaaaaaaaaaaaaaaaaaaaaaaaaaaaaaaaaaaaaaaaaaaaaaaaaaaaaaaaaaaaaaaagaauu

SEQ ID NO: 43034 - RNA, 1541 nt, Artificial Sequence
  mRNA product Design i-3 (hSL-A64-N5) comprising derived and/or modified sequence from LASV(Nig08-A19;Clade III)__ADU56618__GPCmut13 (opt5)
aggagaaagcuuaccaugggccagaucgugaccuucuuucaagaggucccccacguuauugaagaggugaugaacaucgugcugauugcccucagcauccuggcuauucuuaaggggcuguacaauaucgccacaugcggacucaucggccuggucacguuccuucugcucuccgggagaucuuguagcaugaccuauaaaggaguguacgaacugcagacacuggagcucaacaugaauacccugaacaugacaaugccucuuuccugcaccaagaauaacucucaucacuauauuaugguuggcaaugaaacagggcuggagcucacccugacgaacaccagccuucugcaucacaaauuuuguaaucucuccgacgcgcauaagaaaaaccuguacgaucacacacugaugucuaucauuagcaccuuccaccucuccaucccgaauuuuaaccaguaugaggcuaugagcugcgacuucaauggaggcaagauuacagugcaguacaaccugucucauuccuaugccaucgaugccgcuaaucacuguggcaccgucgccaacggggugcuucaaacguuuaugcggauggcuuggggaggcagcuacauugcccuggacucugggcgcggaaagugggauugcaucaugacauccuaccaguaucucaucauucagaacaccacaugggaagaccauugucaguucagcagacccucuccuaucggcuaccuggggcuucugucccaacggacccgcgauauuuauaucagcagacggcuccugggaaccuuuacauggacgcuguccgacucugagggcaaugaaacccccggcggguacugccucacacgcuggaugcugauugaggcggagcuuaaauguuucggaaacaccgccguugcuaagugcaaugaaaaacacgaugaggaauuuugugacaugcugagacucuucgauuuuaacaagcaggccauccggcgccugaaagcugaggcccagaugagcauccagcuuauuaauaaggcggugaacgcccugaucaaugaccaacucauuaugaagaaccaccugagagauaucaugggcauuccuuauugcaauuacuccaaauauugguaccugaaccauacaagcaccgggcggacgucucucccccgcugcuggcuggucuccaauggaagcuaccuuaacgaaacacacuucucugacgacaucgagcagcaggcugauaauaugaucaccgagaugcugcaaaaggaauaucucgacagacagggcaaaaccccucuggggcugguggaucuuuucguguuuagcacauccuucuaccucauuucuaucuuucugcaucuggucaagauuccgugaggacuaguuauaagacugacuagcccgaugggccucccaacgggcccuccuccccuccuugcaccgagauuaaucaaaggcucuuuucagagccaccaaaaaaaaaaaaaaaaaaaaaaaaaaaaaaaaaaaaaaaaaaaaaaaaaaaaaaaaaaaaaaaaagaauu

SEQ ID NO: 43035 - RNA, 1544 nt, Artificial Sequence
  mRNA product Design i-3 (hSL-A64-N5) comprising derived and/or modified sequence from LASV(G1180-SLE-2010;Clade IV)__AIT17168__GPCmut13 (opt5)
aggagaaagcuuaccaugggccagaucgugaccuucuuucaagaggucccccacguuauugaagaggugaugaacaucgugcugauugcccucagcauccuggcuguccuuaaggggcuguacaauuucgccacaugcggacucgugggccugcuuacguuucugcuccugugugggagauccugcaccgcgucucgguauaaaggaguuuacgaacugcagacacucgagcugaacauggaaacccuuaauaugacaaugccucugagcuguaccaagaacaauucccaucacuauauuauggugggcaacgagacagggcucgagcugacccuuacgaauaccucuaucaucaaccauaaauucugcaaucugagcgacgcucacaagaaaaaccucuacgaucaugcccugauguccauuaucucuacauuucaccugagcauuccgaauuucaaccaguaugaagccauguccugugacuuuaauggaggcaagaucagcguccaguacaaccucucucacuccuaugcuggcgaugccgcuaaucauugcgggaccguggccaacggaguucugcaaacauucaugcgcauggcguggggcgggagcuacauugcccuugacucuggacacggcuccugggauuguaucaugaccagcuaccaguaucugauuauccagaacacgacaugggaggaccauugccaguuuucuagacccuccccuaucggguaccucggacugcuuagccaacggacccgcgauauuuauaucuccagacggcugcucggcacauucaccuggacccugucugacagcgaaggcaaggauacacccgggggauacugucugacgcgcuggaugcucauugaggcugagcugaaaugcuuuggcaauaccgccguggcuaaguguaacgaaaaacacgacgaggaguucugcgauaugcuuagacuguuugacuucaauaagcaggccauccagcggcucaaagcggaagcccagauguccauucaacugaucaacaaggcugucaaugcccuuaucaacgaucagcugauuaugaagaaucaccuccgcgacaucauggggauuccuuauugcaacuacagcaaauauugguaccugaaucauacaaccacaggaaagaccucucugcccaaauguuggcucguguccaacggcagcuaccugaaugaaacgcacuucucugacgauaucgagcagcaagcugacaacaugauuacagagaugcuucagaaggaauauauggagagacaggggaaaaccccucugggacucguggaucuguuugucuucagcaccuccuuuuaccugaucucuaucuuccuucaucucguuaagauuccgugaggacuaguuauaagacugacuagcccgaugggccucccaacgggcccuccuccccuccuugcaccgagauuaaucaaaggcucuuuucagagccaccaaaaaaaaaaaaaaaaaaaaaaaaaaaaaaaaaaaaaaaaaaaaaaaaaaaaaaaaaaaaaaaaagaauu

SEQ ID NO: 43036 - RNA, 1544 nt, Artificial Sequence
  mRNA product Design i-3 (hSL-A64-N5) comprising derived and/or modified sequence from LASV(G1442-SLE-2011;Clade IV)__AIT17180__GPCmut13 (opt5)
aggagaaagcuuaccaugggccagaucgugaccuucuuucaagaggucccccacguuauugaagaggugaugaacaucgugcugauugcccucagcauccuggcuguccuuaaggggcuguacaauguggccacaugcggacucauuggccugguuacguuccuucugcucugugggagauccugcaccacaacccuguauaaaggaguguacgaacugcagacacucgagcugaacauggaaacccuuaauaugacaaugccucugucuuguaccaagaacaauagccaucacuauauccgggucggcaacgagacggggcucgagcugacccuuacaaauaccuccaucauuaaccauaaauuuugcaaucugucugacgcgcacaagaaaaaccucuacgaucaugcucugaugagcaucauuuccacauuccaccugucuaucccgaauuuuaaccaguaugaagccaugagcugugacuucaauggaggcaagauuuccgugcaguacaaccucagccacucuuaugccggcgaugcugccaaucauugcgggaccguugcuaacggagugcugcaaacguuuaugcgcauggccuggggcggguccuacaucgcgcuugacagcggaagaggcaacugggauuguauuaugacaucuuaccaguaucugaucauccagaauaccacaugggacgaucacugccaguucucccggcccagcccuauuggguaccucggacugcuuucucaacgcaccagagacgucuauaucucccggcgccugcucggcaccuuuacauggacgcugagcgauuccgagggcaaggacacccccgggggauacugucugacaagauggaugcucauugaagccgagcugaaaugcuucggcaacaccgcuguggccaaguguaaugagaaacaugaugaagaguuuugcgacaugcuucggcuguucgauuuuaacaagcaggcuauccagcgccucaaagccgaagcgcagaugucuauucaacugaucaauaaggccgugaacgcucuuaucaaugaccagcugauuaugaagaaccaccucagagacaucauggggauuccuuauugcaauuacagcaaauauugguaccugaacaauacagccaccggaaagacgucccugcccaaauguuggcucaucagcaacggcucuuaccugaaugagacacacuucuccgaugacauugaacaggaggcugauaacaugaucaccgagaugcuucaaaaggaauauauggagcggcaggggaaaaccccucugggacucgucgaccuguucguuuuuagcacaucuuucuaccugaucagcauuuuucuucaucucgugaagaucccgugaggacuaguuauaagacugacuagcccgaugggccucccaacgggcccuccuccccuccuugcaccgagauuaaucaaaggcucuuuucagagccaccaaaaaaaaaaaaaaaaaaaaaaaaaaaaaaaaaaaaaaaaaaaaaaaaaaaaaaaaaaaaaaaaagaauu

SEQ ID NO: 43037 - RNA, 1544 nt, Artificial Sequence
  mRNA product Design i-3 (hSL-A64-N5) comprising derived and/or modified sequence from LASV(G3010-SLE-2013;Clade IV)__AIT17344__GPCmut13 (opt5)
aggagaaagcuuaccaugggccagaucgugaccuucuuucaagaggucccccacguuauugaagaggugaugaacaucgugcugauugcccucagcauccuggcuguccuuaaggggcuguacaauuucgccacaugcggacucgugggccugguuacguuucuucugcucugugggagauccugcaccacaucucuguauaaaggaguguacgaacugcagacccucgagcugaacauggaaacacuuaauaugaccaugccucugagcuguacaaagaacaauucccaucacuauauuauggucggcaacgagaccgggcucgagcugacgcuuaccaauacaucuaucaucaaccauaaauucugcaaucugagcgacgcgcacaagaaaaaccucuacaaucaugcucugauguccauuaucucuaccuuucaccugagcauuccgaacuucaaucaguaugaagccauguccugugauuuuaacggaggcaagaucagcgugcaguacaaucucucucacuccuaugccggcgacgcugccagccauugcgggacaguugcuaacggagugcugcaaaccuucaugcggauggccuggggcgggucuuacauugcgcuugauuccggauacggcaagugggacuguaucaugacgagcuaucaguaccugauuauccagaacacaaccugggaggaucacugccaguuuucucgccccuccccuaucggguaucucggacugcuuagccaaagaacacgggacauuuacaucucccgcagacugcucggcaccuucaccuggacacugucugauagcgaaggcaaagacacgcccgggggauauugucugacccgguggaugcucauugaggccgagcugaagugcuuuggcaauacagcugucgccaaauguaacgaaaagcaugaugaggaguucugcgacaugcuucgccuguuugauuucaauaaacaggcuauccagagacucaagaccgaagcccagauguccauucaacugaucaacaaggcggugaaugcccuuaucaacgaccagcugauuaugaaaaaucaccuccgggauaucauggggauuccuuacugcaacuauagcaaguacugguaccugaaucacacaaccacgggaaaaacaucucugcccaaguguuggcucguguccaacggcagcuaucugaaugaaacccauuucucugacgacaucgagcagcaagcugauaacaugauuaccgagaugcuucagaaagaauacauggagcgccaggggaagacaccucugggacucgucgaccuguuuguuuucagcaccuccuuuuaucugaucucuaucuuccuucaccucgugaaaauuccgugaggacuaguuauaagacugacuagcccgaugggccucccaacgggcccuccuccccuccuugcaccgagauuaaucaaaggcucuuuucagagccaccaaaaaaaaaaaaaaaaaaaaaaaaaaaaaaaaaaaaaaaaaaaaaaaaaaaaaaaaaaaaaaaaagaauu

SEQ ID NO: 43038 - RNA, 1544 nt, Artificial Sequence
  mRNA product Design i-3 (hSL-A64-N5) comprising derived and/or modified sequence from LASV(G502-SLE-2009;Clade IV)__AIT17126__GPCmut13 (opt5)
aggagaaagcuuaccaugggccagaucgugaccuucuuucaagaggucccccacguuauugaagaggugaugaacaucgugcugauugcccucagcauccuggcuguccuuaaggggcuguacaauuucgccacaugcggacucgugggccugcuuacguuucugcuccugugugggagauccugcaccacaggacuguauaaaggcguuuacgaacuccagacccuggagcuuaacauggaaacacugaauaugaccaugccucucucuuguacaaagaacaauagccaucacuauauuaugguggggaacgagaccggacuggagcuuacgcugaccaauacauccaucaucaaccauaaauucugcaaucucucugacgcgcacaagaaaaaccuguacgaucaugcucugaugagcauuaucuccaccuuucaccucucuauuccgaauuucaaccaguaugaagccaugagcugugacuuuaauggcggcaagaucuccguccaguacaaccugagccacucuuaugccggggaugcugccgaccauugcggaacaguggcuaauggcguucuucaaaccuucaugcggauggccuggggaggguccuacauugcgcuggauagcggccgcgggagaugggacuguaucaugacgucuuaccaguaucucauuauccagaacacaaccugggaggaucacugccaguuuucccggcccagcccuaucggauaccugggccuucugucucaacgcacaagagacauuuauaucucccggcgccuccugggcaccuucaccuggacacugagcgauuccgaagggaaggacacgcccggaggcuacugucucaccagauggaugcugauugaggccgagcuuaaaugcuuugggaacacagcuguggccaaguguaaugaaaaacaugaugaggaguucugcgacaugcugcggcucuuugauuucaacaagcaggcuauccagcgccugaaagccgaagcgcagaugucuauucaacuuaucaauaaggccgucaacgcucugaucaaugaccagcucgugaugaagaaccaccugagagacauuaugggaaucccuuauugcaauuacagccgguauugguaccugaaccacaccacaaccggccgcacgucccuccccaaauguuggcuggugagcaaugggucuuaccuuaacgaaacacauuucuccgaugacauugagcagcaagccgauaauaugaucaccgagaugcugcagaaggaauauauggagagacagggaaaaaccccucucggccuggucgaccuguuuguuuucagcacaucuuuuuaccuuauuagcaucuuccuccaccuggugaagaucccgugaggacuaguuauaagacugacuagcccgaugggccucccaacgggcccuccuccccuccuugcaccgagauuaaucaaaggcucuuuucagagccaccaaaaaaaaaaaaaaaaaaaaaaaaaaaaaaaaaaaaaaaaaaaaaaaaaaaaaaaaaaaaaaaaagaauu

SEQ ID NO: 43039 - RNA, 1544 nt, Artificial Sequence
  mRNA product Design i-3 (hSL-A64-N5) comprising derived and/or modified sequence from LASV(G733-SLE-2010;Clade IV)__AIT17154__GPCmut13 (opt5)
aggagaaagcuuaccaugggccagaucgugaccuucuuucaagaggucccccacguuauugaagaggugaugaacaucgugcugauugcccucagcauccuggcuguccuuaaggggcuguacaauuucgccacaugcggaauugugggccucguuuccuuucugcuucugugugggagaucuugcacgaccagccucuauaaaggaguguacgaacugcagacacuggagcucaacauggaaacccugaauaugacaaugccucuuuccuguaccaagaacaauucucaucacuauaucauggucggcaacgagacagggcuggagcucacccugacgaauaccagcaucauuaaccauaaauucugcaaucuuuccgacgcgcacaagaaaaaccuguacgaucaugcucucaugucuaucauuagcacauuucaccuguccaucccgaauuucaaccaguaugaagccaugagcugugacuuuaauggaggcaagauuucugugcaguacaaccugucccacagcuaugccggcgaugcugccaaucauugcgggaccaucgcuaacggaguucuccaaacauucaugcggauggccuggggcgggucuuacauugcgcuggacuccggacgcgauagaugggacuguaucaugaccagcuaccaguaucuuaucauucagaacacgacaugggaggaucacugccaguuuucucggcccuccccuaucggcuaccuggggcuccugagccaacgcaccagagacauuuauaucucccggcgccuucugggaacauucaccuggacccucucugauagcgaaggcaaggacacacccggcggguacugucugacgagauggaugcugauugaggccgagcucaaaugcuuuggaaauaccgcuguggccaaguguaacgaaaaacaugaugaggaguucugcgacaugcugcggcuuuuugauuucaauaagcaggcuauccagcgccugaaagccgaagcgcagauguccauccaacucauuaacaaggccgucaaugcucugaucaacgaccagcuuauuaugaagaaucaccugagagacaucaugggcauuccuuauugcaacuacagcaaauauugguaccucaaucacacaaccacagggaagaccucucugcccaaauguuggcugguguccaacggaagcuaccucaaugaaacgcauuucucugaugacaucgagcagcaagccgauaacaugaucacagagaugcugcagaaggaauauauggagcggcagggcaaaaccccucuugggcugguggaccucuuugucuucagcaccuccuuuuaccugauuucuaucuuccugcaccuuguuaagauuccgugaggacuaguuauaagacugacuagcccgaugggccucccaacgggcccuccuccccuccuugcaccgagauuaaucaaaggcucuuuucagagccaccaaaaaaaaaaaaaaaaaaaaaaaaaaaaaaaaaaaaaaaaaaaaaaaaaaaaaaaaaaaaaaaaagaauu

SEQ ID NO: 43040 - RNA, 1544 nt, Artificial Sequence
  mRNA product Design i-3 (hSL-A64-N5) comprising derived and/or modified sequence from MOPV/LASV reassortant(IGS-1;Clade IV)__AFY05576__GPCmut13 (opt5)
aggagaaagcuuaccaugggccagaucgugaccuucuuucaagaggucccccacguuauugaagaggugaugaacaucgugcugauugcccucagcguccuggcugugcuuaaggggcuguacaauuucgccacaugcggacucguuggccuggugacguuucuucugcucugugggagauccugcaccacaucucuguauaaaggagucuacgaacugcagacccucgagcugaacauggaaacacuuaauaugaccaugccucugagcuguacaaagaacaauucccaucacuauaucauggugggcaacgagaccgggcucgagcugacgcuuaccaauacaucuauuaucaaccauaaauucugcaaucugagcgacgcgcacaagaaaaaccucuacgaucaugcucugauguccaucauuucuaccuuucaccugagcaucccgaauuucaaccaguaugaagccauguccugugacuuuaauggaggcaagauuagcguucaguacaaccucucucacuccuaugccggcgaugcugccaaucauugcgggacaguggcuaacggaguccugcaaaccuucaugcggauggccuggggcgggagcuacaucgcgcuugacucuggacgcggcaacugggauuguauuaugacguccuaccaguaucugaucauucagaauacaaccugggaggaccacugccaguuuagcagacccucuccuaucggguaccucggacugcuuucccaacggacacgcgauaucuauauuagcagacggcugcucggcaccuucaccuggacacuguccgacucugaaggcgaggauacgcccgggggauacugucugacccgcuggaugcucaucgaggccgaacugaagugcuuuggcaacacagcuguggccaaauguaaugagaagcaugacgaagaguucugcgauaugcuuagacuguuugacuucaacaaacaggcuauucagcggcucaaggccgaagcgcagaugagcauccaacugauuaauaaagccgugaacgcucuuaucaaugaucagcugaucaugaagaaccaccuccgcgacauuauggggaucccuuauugcaauuacuccaaguauugguaccugaaccacaccacaaccggaagaacgagccugcccaaauguuggcucgucucuaauggcuccuaccugaacgagacacauuucagcgacgauauugagcagcaagccgacaauaugaucaccgaaaugcuucagaaggaguauauggaacggcaggggaaaaccccucugggacucguugaucuguuuguguucucuaccagcuuuuaccugauuuccaucuuccuucaccucgugaagaucccgugaggacuaguuauaagacugacuagcccgaugggccucccaacgggcccuccuccccuccuugcaccgagauuaaucaaaggcucuuuucagagccaccaaaaaaaaaaaaaaaaaaaaaaaaaaaaaaaaaaaaaaaaaaaaaaaaaaaaaaaaaaaaaaaaagaauu

SEQ ID NO: 43041 - RNA, 1544 nt, Artificial Sequence
  mRNA product Design i-3 (hSL-A64-N5) comprising derived and/or modified sequence from LASV(LM765-SLE-2012;Clade IV)__AIT17814__GPCmut13 (opt5)
aggagaaagcuuaccaugggccagaucgugaccuucuuucaagaggucccccacguuauugaagaggugaugaacaucgugcugauugcccucagcauccuggcuguccuuaaggggcuguacaauuucgccacaugcggacucgugggccugguuacguuucuucugcucugugggagauccugcaccacaucucuguauaaaggaguguacgaacugcagacccucgagcugaacauggaaacacuuaauaugaccaugccucugagcuguacaaagaacaauucccaucacuauauuauggucggcaacgagaccgggcucgagcugacgcuuaccaauacaucuaucaucgaccauaaauucugcaaccugagcgaugcgcaccggaagaaucucuacgaccaugcucugauguccauuaucucuaccuuucaccugagcauuccgaacuucaaucaguaugaagccauguccugugauuuuaacggaggcaaaaucagcgugcaguacaaucucucucacuccuaugccaaggacgcugccgaucauugcggcacaguugcuaacggggugcugcaaaccuucaugcgcauggccuggggaggcagcuacauugcgcuugacucugggagaggacggugggauuguaucaugacguccuaccaguaucugauuauccagaauacaaccugggaggaccacugccaguuuagccgccccucuccuaucggcuaccucgggcugcuuucccaaagaacacgggauauuuauaucagccgcagacugcucggaaccuucaccuggacacuguccgacucugaaggcaaggauacgcccggcggguacugucugacccgguggaugcucauugaggccgagcugaaaugcuuuggaaacacagcugucgccaaguguaacgaaaaacaugacgaggaguucugcgauaugcuucgccuguuugacuucaauaagcaggcuauccagagacucaaagccgaagcgcagaugagcauucaacugaucaacaaggccgugaaugcucuuaucaacgaccagcugauuaugaagaaucaccuccgggauaucaugggcauuccuuauugcaacuacuccaaauauugguaccugaaucacaccacaaccgggaagacgagccugcccaaauguuggcucgugucuaacggauccuaccugaaugaaacacauuucagcgacgauaucgagcagcaagccgacaacaugauuaccgagaugcuucagaaggaauauauggagcgccagggcaaaaccccucuggggcucgucgaucuguuuguuuucucuaccagcuuuuaccugaucuccaucuuccuucaccucgugaagauuccgugaggacuaguuauaagacugacuagcccgaugggccucccaacgggcccuccuccccuccuugcaccgagauuaaucaaaggcucuuuucagagccaccaaaaaaaaaaaaaaaaaaaaaaaaaaaaaaaaaaaaaaaaaaaaaaaaaaaaaaaaaaaaaaaaagaauu

SEQ ID NO: 43042 - RNA, 1544 nt, Artificial Sequence
  mRNA product Design i-3 (hSL-A64-N5) comprising derived and/or modified sequence from LASV(LM776-SLE-2012;Clade IV)__AIT17824__GPCmut13 (opt5)
aggagaaagcuuaccaugggccagaucgugaccuucuuucaagaggucccccacguuauugaagaggugaugaacaucgugcugauugcccucagcauccuggcuguccuuaaggggcuguacaauuucgccacaugcggacucgugggccugguuacguuucuucugcucugugggagauccugcaccacaucuguguauaaaggagucuacgaacugcagacccuggagcucaacauggaaacacugaauaugaccaugccucuuagcuguacaaagaacaauucccaucacuauauuauggugggcaacgagaccgggcuggagcucacgcugaccaauacaucuaucaucaaccauaaauucugcaaucuuagcgacgcgcacaagaaaaaccuguacgaucaugcucucauguccauuaucucuaccuuucaccugagcauuccgaauuucaaccaguaugaagccauguccugugacuuuaauggaggcaagaucagcguucaguacaaccugucucacuccuaugccggcgaugcugccaaucauugcgggacaguggcuaacggaguccuccaaaccuucaugcggauggccuggggcgggagcuacauugcgcuggacucuggacacggcaagugggauuguaucaugacguccuaccaguaucuuauuauccagaacacaaccugggaggaccauugccaguuuagccgccccucuccuaucggguaccugggacuccugucccaaagaacacgggauauuuauaucagccgcagacuucugggcaccuucaccuggacacucuccgacucugaaggcaaagauacgcccgggggauacugucugacccgguggaugcugauugaggccgagcucaagugcuuuggcaauacagcuguggccaaauguaacgaaaagcacgacgaggaguucugcgauaugcugcgccuuuuugacuucaauaaacaggcuauccagagacugaaggccgaagcgcagaugagcauucaacucaucaacaaggccgugaaugcucugaucaacgaucagcuuauuaugaaaaaucaucugcgggacaucauggggauuccuuauugcaacuacuccaaguauugguaccucaaucacaccacaaccggaaaaacgagccugcccaaguguuggcuggucucuaacggcuccuaccucaaugaaacacacuucagcgacgauaucgagcagcaagccgacaacaugauuaccgagaugcugcagaaagaauauauggagcgccaggggaagaccccucuuggacugguugaucucuuuguguucucuaccagcuuuuaccugaucuccaucuuccugcaucuugugaaaauuccgugaggacuaguuauaagacugacuagcccgaugggccucccaacgggcccuccuccccuccuugcaccgagauuaaucaaaggcucuuuucagagccaccaaaaaaaaaaaaaaaaaaaaaaaaaaaaaaaaaaaaaaaaaaaaaaaaaaaaaaaaaaaaaaaaagaauu

SEQ ID NO: 43043 - RNA, 1544 nt, Artificial Sequence
  mRNA product Design i-3 (hSL-A64-N5) comprising derived and/or modified sequence from LASV(Mad39;Clade IV)__ANH09722__GPCmut13 (opt5)
aggagaaagcuuaccaugggccagaucgugaccuucuuucaagaggucccccacguuauugaagaggugaugaacaucgugcugauugcccucagcauccuggcuguccuuaaggggcuguacaauguggccacaugcggacucauuggccugguuacguuccuucugcucugugggagauccugcaccacaacccuguauaaaggaguguacgaacugcaggcgcucgagcugaacauggaaacacuuaauaugaccaugccucugucuuguacaaagaacaauagccaucacuauauccgggucggcaacgagaccgggcucgagcugacgcuuaccaauacaucccugaucaaccauaaauuuugcaaucucucugacgcucacaagaaaaaccuguacgaucaugcccugaugagcauuaucuccaccuuccaccucucuauuccgaauuuuaaccaguaugaagccaugagcugugacuucaaugauggaaagaucuccgugcaguacaaccugagccacacauaugcuggcgacaccgccaaucauugcggcacgguugcuaacggggugcuucaaacauuuaugcgcauggccuggggaggcucuuacauugcgcuggauuccgggagaggaggcugggacuguaucaugaccagcuaccaguaucucauuauccagaacacaaccugggaggaucacugccaguucucucggcccuccccuaucggguaccugggacuucugagccaacgcaccagagacauuuauaucucucggcgccuccugggcacauuuacguggacccuguccgauagcgaaggcaaggacacacccgggggauacugucucaccagauggaugcugauugaggccgagcuuaaaugcuucggcaauacagcugucgccaaguguaacgaaaaacaugaugaggaauuuugcgacaugcugcgccucuucgauuuuaauaagcaggcuauccagcggcugaaagccgaggcgcagauguccauucaacuuaucaacaaggccgugaaugcucugaucaacgaccagcucauuaugaagaaucaccugagagacaucauggggauuccuuauugcaacuacucuaaauauugguaccugaaucacaccgugacgggaaagacaagccuccccaaauguuggcuggucuccaacggcagcuaccuuaaugaaacccauuucucugaugacaucgagcagcaagccgauaacaugauuaccgagaugcugcagaaggaauauauggagcggcaggggaaaacaccucucggacugguugaccuguucguguuuuccaccagcuucuaccuuaucucuaucuuucuccaccuggugaagauuccgugaggacuaguuauaagacugacuagcccgaugggccucccaacgggcccuccuccccuccuugcaccgagauuaaucaaaggcucuuuucagagccaccaaaaaaaaaaaaaaaaaaaaaaaaaaaaaaaaaaaaaaaaaaaaaaaaaaaaaaaaaaaaaaaaagaauu

SEQ ID NO: 43044 - RNA, 1544 nt, Artificial Sequence
  mRNA product Design i-3 (hSL-A64-N5) comprising derived and/or modified sequence from LASV(Z0947-SLE-2011;Clade IV)__AIT17840__GPCmut13 (opt5)
aggagaaagcuuaccaugggccagaucgugaccuucuuucaagaggucccccacguuauugaagaggugaugaacaucgugcugauugcccucagcauccuggcuguccuuaaggggcuguacaauuucgccacaugcggacucgugggccugguuacguuucuucugcucugugggagauccugcaccauuucucuguauaaaggaguguacgaacugcagacacucgagcugaacauggaaacccuuaauaugacaaugccucugagcuguaccaagaacaauucccaucacuauaucauggucggcaacgagacagggcucgagcugacccuuacgaauaccucuaucauuaaccauaaauucugcaaucugagcgacgcgcacaagaaaaaccucuacgaucaugcucugauguccaucauuucuacauuucaccugagcaucccgaauuucaaccaguaugaagccauguccugugacuuuaauggaggcaagauuagcgugcaguacaaccucucucacuccuaugccggcgaugcugccaaucauugcgggaccguugcuaacggagugcugcaaacauucaugcggauggccuggggcgggagcuacaucgcgcuugacucuggacgcgauagaugggacuguauuaugaccuccuaccaguaucugaucauccagaacacgacaugggaggaucacugccaguuuagccggcccucuccuauuggcuaccucgggcugcuuucccaacgcaccagagacaucuauauuagccggcgccugcucggaacauucaccuggacccuguccgauucugaaggcaaggacacacccggcggguacugucugacgagauggaugcucaucgaggccgagcugaaaugcuuuggaaauaccgcugucgccaaguguaacgaaaaacaugaugaggaguucugcgacaugcuucggcuguuugauuucaauaagcaggcuauucagcgccucaaagccgaagcgcagaugagcauccaacugaucaacaaggccgugaaugcucuuauuaacgaccagcugaucaugaagaaucaccucagagacauuaugggcaucccuuauugcaacuacuccaaauauugguaccugaaucacacaaccacagggaagaccagccugcccaaauguuggcucgugucuaacggauccuaccugaaugaaacgcauuucagcgaugacauugagcagcaagccgauaacaugaucacagagaugcuucagaaggaauauauggagcggcagggcaaaaccccucuggggcucgucgaccuguuuguuuucucuaccagcuuuuaccugaucuccauuuuccuucaccucgugaagaucccgugaggacuaguuauaagacugacuagcccgaugggccucccaacgggcccuccuccccuccuugcaccgagauuaaucaaaggcucuuuucagagccaccaaaaaaaaaaaaaaaaaaaaaaaaaaaaaaaaaaaaaaaaaaaaaaaaaaaaaaaaaaaaaaaaagaauu

SEQ ID NO: 43045 - RNA, 1575 nt, Artificial Sequence
  mRNA product Design i-3 (hSL-A100) comprising derived and/or modified sequence from LASV(Josiah;Clade IV)__NP_694870__GPCmut13 (opt1)
aggagaaagcuuaccaugggccagaucgugaccuucuuccaggaggucccccacgugaucgaggaggugaugaacaucguccugaucgcccucagcgugcuggccgugcugaaggggcucuacaacuucgcgaccugcggccuggucgggcuggugacguuccuccugcugugcggccgcuccugcaccaccagccucuacaaggggguguacgagcugcagacccuggagcucaacauggagacgcugaacaugaccaugccgcuguccugcaccaagaacaacagccaccacuacaucauggucggcaacgagaccggccucgagcugacgcugaccaacaccuccaucaucaaccacaaguucugcaaccucagcgacgcccacaagaagaaccuguacgaccacgcccugauguccaucaucagcaccuuccaccucuccauccccaacuucaaccaguacgaggccaugagcugcgacuucaacgggggcaagaucuccgugcaguacaaccugagccacuccuacgccggggacgcggccaaccacugcggcacgguggccaacgggguccugcagaccuucaugcggauggccuggggcggcagcuacaucgcgcucgacuccgggcgcggcaacugggacugcaucaugaccagcuaccaguaccugaucauccagaacaccacgugggaggaccacugccaguucucccggcccagccccaucggguaccugggccuccugucccagcgcacccgggacaucuacaucagccgccggcugcucggcaccuucaccuggacgcugagcgacuccgaggggaaggacaccccgggcggguacugccugacccgcuggaugcucaucgaggccgagcugaagugcuucggcaacaccgccguggccaagugcaacgagaagcacgacgaggaguucugcgacaugcugcggcuguucgacuucaacaagcaggccauccagcgccugaaggcggaggcccagaugagcauccagcugaucaacaaggccgugaacgcccucaucaacgaccagcugaucaugaagaaccaccuccgggacaucauggggauccccuacugcaacuacuccaaguacugguaccucaaccacacgaccaccggccgcaccagccugcccaagugcuggcuggucuccaacggcagcuaccucaacgagacgcacuucuccgacgacaucgagcagcaggccgacaacaugaucaccgagaugcugcagaaggaguacauggagcggcaggggaagacgccccugggccucguggaccuguucguguucagcaccuccuucuaccugaucagcaucuuccugcaccucgucaagaucccgugaggacuaguuauaagacugacuagcccgaugggccucccaacgggcccuccuccccuccuugcaccgagauuaaucaaaggcucuuuucagagccaccaaaaaaaaaaaaaaaaaaaaaaaaaaaaaaaaaaaaaaaaaaaaaaaaaaaaaaaaaaaaaaaaaaaaaaaaaaaaaaaaaaaaaaaaaaaaaaaaaaaaa

SEQ ID NO: 43046 - RNA, 1572 nt, Artificial Sequence
  mRNA product Design i-3 (hSL-A100) comprising derived and/or modified sequence from LASV(LP;Clade I)__AAF86701__GPCmut13 (opt1)
aggagaaagcuuaccaugggccagaucaucaccuucuuccaggaggugccccacgucaucgaggaggugaugaacaucgugcugaucgcccucagccugcuggccauccucaaggggcuguacaacaucgcgaccugcggcaucaucgggcuggucgccuuccucuuccugugcggcaaguccugcagccugacgcucaagggcggguacgagcugcagacccuggagcucaacauggagacccugaacaugaccaugccgcuguccugcacgaagaacagcucccaccacuacauccgcgugggcaacgagaccgggcucgagcugacccugaccaacacgagcaucaucaaccacaaguucugcaaccucuccgacgcccacaagaagaaccuguacgaccacgcccugaugagcaucaucuccaccuuccaccucagcauccccaacuucaaccaguacgaggccauguccugcgacuucaacggcgggaagaucagcgugcaguacaaccugucccacagcuacgcgggcgacgccgccgagcacugcgggaccgucgccaacggcgugcugcagaccuucaugcggauggcguggggcgggcgcuacaucgcccucgacuccggcaaggggaacugggacugcaucaugacgagcuaccaguaccugaucauccagaacaccaccugggaggaccacugccaguucucccggcccagccccaucggcuaccugggccuccugucccagcgcacccgggacaucuacaucagccgccggcugcucgggacguucaccuggacccugagcgacuccgagggcaacgagacccccgggggcuacugccugacgcgcuggaugcucaucgaggccgagcugaagugcuucgggaacaccgccguggccaagugcaacgagaagcacgacgaggaguucugcgacaugcugcggcuguucgacuucaacaagcaggcgauccgccggcugaaggccgaggcccagaugagcauccagcugaucaacaaggccgucaacgcccucaucaacgaccagcugaucaugaagaaccaccuccgcgacaucaugggcauccccuacugcaacuacuccaaguacugguaccucaaccacaccagcuccggccggaccagccugcccaagugcuggcugaucuccaacgggagcuaccucaacgagacgcaguucuccgacgacaucgagcagcaggcggacaacaugaucaccgagaugcugcagaaggaguacaucgagcgccagggcaagaccccgcuggggcucguggacaucuucaucuucagcaccuccuucuaccugaucagcaucuuccugcaccugaucaagaucccgugaggacuaguuauaagacugacuagcccgaugggccucccaacgggcccuccuccccuccuugcaccgagauuaaucaaaggcucuuuucagagccaccaaaaaaaaaaaaaaaaaaaaaaaaaaaaaaaaaaaaaaaaaaaaaaaaaaaaaaaaaaaaaaaaaaaaaaaaaaaaaaaaaaaaaaaaaaaaaaaaaaaaa

SEQ ID NO: 43047 - RNA, 1572 nt, Artificial Sequence
  mRNA product Design i-3 (hSL-A100) comprising derived and/or modified sequence from LASV(803213;Clade II)__AAF86703__GPCmut13 (opt1)
aggagaaagcuuaccaugggccagaucaucaccuucuuccaggaggugccccacgucaucgaggaggugaugaacaucgugcugaucgcccucagccugcuggccauccucaaggggaucuacaacgucgcgaccugcggccuguucgggcugaucuccuuccuccugcugugcggccgcagcugcuccgugacguacaaggggguguacgagcuccagacccuggagcugaacauggccaaccucaacaugaccaugccgcugagcugcaccaagaacaacucccaccacuacaucauggucggcaacgagacgggccuggagcucacccugaccaacaccagcaucaucaaccacaaguucugcaaccuguccgacgcccacaagaagaaccucuacgaccacgcccugaugagcaucaucuccacguuccaccugagcauccccaacuucaaccaguacgaggccauguccugcgacuucaacgggggcaagaucagcgugcaguacaaccucucccacagcuucgcgguggacgccgccaaccacugcgggaccaucgccaacggcguccugcagaccuucaugcggauggcguggggcggguccuacaucgcccuggacagcggcaaggggaacugggacugcaucaugaccuccuaccaguaccucaucauccagaacacgaccugggaggaccacugccaguucagccgccccucccccaucggcuaccuggggcugcucagccagcggacccgcgacaucuacaucagccggcgccugcugggcaccuucacguggacccucuccgacagcgagggcaacgaggcccccgggggcuacugccugacccgguggaugcugaucgaggccgagcucaagugcuucgggaacaccgccguggcgaagugcaacgagaagcacgacgaggaguucugcgacaugcugcgccuguucgacuucaacaagcaggccaucaagcggcucaagacggaggcccagauguccauccagcugaucaacaaggccgugaacgcccugaucaacgaccagcucaucaugaagaaccaccuccgcgacaucaugggcauccccuacugcaacuacagccgguacugguaccugaaccacaccgucaccgggaagaccucccugccccgcugcuggcuggugagcaacggcuccuaccugaacgagacgcacuucagcgacgacaucgagcagcaggcggacaacaugaucaccgagaugcuccagaaggaguacauggaccggcagggcaagaccccgcuggggcugguggaccucuucgucuucuccaccagcuucuaccugaucuccaucuuccugcaccuggugaagaucccgugaggacuaguuauaagacugacuagcccgaugggccucccaacgggcccuccuccccuccuugcaccgagauuaaucaaaggcucuuuucagagccaccaaaaaaaaaaaaaaaaaaaaaaaaaaaaaaaaaaaaaaaaaaaaaaaaaaaaaaaaaaaaaaaaaaaaaaaaaaaaaaaaaaaaaaaaaaaaaaaaaaaaa

SEQ ID NO: 43048 - RNA, 1572 nt, Artificial Sequence
  mRNA product Design i-3 (hSL-A100) comprising derived and/or modified sequence from LASV(GA391;Clade III)__CAA36645__GPCmut13 (opt1)
aggagaaagcuuaccaugggccagaucgugaccuucuuccaggaggucccccacgugaucgaggaggugaugaacaucguccugaucgcccucagcauccuggccauccugaaggggcucuacaacguggcgaccugcggccugaucgggcuggugacguuccuccugcuguccggccgcagcugcucccucaucuacaaggggaccuacgagcugcagacccuggagcucaacauggagacccugaacaugacgaugccgcugagcugcaccaagaacaacucccaccacuacauccgggucggcaacgagaccggccucgagcugacccugacgaacaccagcauccucaaccacaaguucugcaaccuguccgacgcccacaagcgcaaccuguacgaccacagccucauguccaucaucagcaccuuccaccuguccauccccaacuucaaccaguacgaggccaugagcugcgacuucaacgggggcaagaucaccgugcaguacaaccugucccacagcuucgccguggacgccgcggggcacugcggcacgcucgccaacgggguccugcagaccuucaugcggauggccuggggcggcuccuacaucgcccuggacagcgggcgcggcaacugggacugcaucaugaccuccuaccaguaccucaucauccagaacaccacgugggacgaccacugccaguucagccggcccucccccaucggguaccugggccugcucagccagcgcacccgggacaucuacaucagccgccggcugcugggcaccuucaccuggacgcucuccgacagcgaggggaacgagaccccgggcggguacugccugacccgcuggaugcugaucgaggcggagcucaagugcuucggcaacaccgccguggccaagugcaacgagaagcacgacgaggaguucugcgacaugcugcggcuguucgacuucaacaagcaggccauccgccggcucaagacggaggcccagauguccauccagcugaucaacaaggcggugaacgcccugaucaacgaccagcucaucaugaagaaccaccuccgcgacaucauggggauccccuacugcaacuacagccgguacugguaccugaaccacaccuccaccggcaagaccagccugccccgcugcuggcugaucuccaacggcagcuaccugaacgagacgaaguucuccgacgacaucgagcagcaggccgacaacaugaucaccgagaugcuccagaaggaguacaucgaccggcaggggaagacgccccugggccuggucgaccuguucguguucagcaccuccuucuaccucaucagcaucuuccugcaccuggugaagaucccgugaggacuaguuauaagacugacuagcccgaugggccucccaacgggcccuccuccccuccuugcaccgagauuaaucaaaggcucuuuucagagccaccaaaaaaaaaaaaaaaaaaaaaaaaaaaaaaaaaaaaaaaaaaaaaaaaaaaaaaaaaaaaaaaaaaaaaaaaaaaaaaaaaaaaaaaaaaaaaaaaaaaaa

SEQ ID NO: 43049 - RNA, 1575 nt, Artificial Sequence
  mRNA product Design i-3 (hSL-A100) comprising derived and/or modified sequence from LASV(AV;Clade V)__CCA30314__GPCmut13 (opt1)
aggagaaagcuuaccaugggccagaucgugaccuucuuccaggaggucccccacgugaucgaggaggugaugaacaucguccugaucgcccucagcauccuggccgugcugaaggggcucuacaacaucgcgaccugcggccugaucgggcugaucacguuccuccugcugugcggccgcuccugcagcuccaaccucuacaaggggguguacgagcugcagagccuggaccucaacauggagacccugaacaugaccaugccgcuguccugcaccaagaacaacagccaccacuacauccgggucggcaacgacacgggccucgagcugacccugaccaacaccuccauccucaaccacaaguucugcaaccugagcgacgcccacaagaaggaccuguacgaccacgcccucauguccaucaucagcacguuccaccuguccauccccaacuucaaccaguacgaggccaugagcugcgacuucaacgggggcaagaucuccgugcaguacaaccugagccacuccuacgccaucgacgcggccaaccacugcgggaccguggccaacggcauccuccagaccuucaugcgcauggccuggggcgggagcuacaucgcgcuggacuccggccgggggaacugggacugcaucaugaccagcuaccaguaccugaucauccagaacacgaccugggagaaccacugccaguucucccgccccagccccaucggcuaccucgggcugcugagccagcggacccgcgacaucuacaucucccggcgccuccugggcaccuucacguggacccugagcgacuccgagggcaacgccacccccgggggcuacugccucacccgguggaugcugaucgaggccgagcugaagugcuucgggaacacggccgucgccaagugcaacgagaagcacgacgaggaguucugcgacaugcuccgccuguucgacuucaacaagcaggcgaucagccggcugaaguccgaggcccagaugagcauccagcucaucaacaaggccgugaacgcccugaucaacgaccagcugaucaugaagaaccaccuccgcgacaucaugggcauccccuacugcaacuacuccaaguacugguaccugaaccacaccaucaccgggaagaccagccugcccaagugcuggcucguguccaacggcagcuaccugaacgagacgcacuucuccgacgacaucgagcagcaggccgacaacaugaucaccgagaugcugcagaaggaguacauggagcggcagggcaagaccccgcucgggcuggucgaccuguucguguucagcaccuccuucuaccugaucagcaucuuccuccgccuggugaagaucccgugaggacuaguuauaagacugacuagcccgaugggccucccaacgggcccuccuccccuccuugcaccgagauuaaucaaaggcucuuuucagagccaccaaaaaaaaaaaaaaaaaaaaaaaaaaaaaaaaaaaaaaaaaaaaaaaaaaaaaaaaaaaaaaaaaaaaaaaaaaaaaaaaaaaaaaaaaaaaaaaaaaaaa

SEQ ID NO: 43050 - RNA, 1572 nt, Artificial Sequence
  mRNA product Design i-3 (hSL-A100) comprising derived and/or modified sequence from LASV(Togo/2016/7082;Clade VI)__AMR44577__GPCmut13 (opt1)
aggagaaagcuuaccaugggccagaucaucaccuucuuccaggaggugccccacgucaucgaggaggugaugaacaucgugcugaucgcccucagccugcuggccauccucaagggggucuacaacguggcgaccugcggcaucaucgggcuggugacguuccuguuccucugcggccgcuccugcagccugaucuacaagggguccuacgagcugcagacccucgagcugaacauggagacccugaacaugaccaugccgcucagcugcacgaagaacuccagccaccacuacauccgggucggcaacgagaccggccuggagcugacccucaccaacacguccaucaucaaccacaaguucugcaaccugagcgacgcccacaagcgcaaccuguacgaccacgcccucauguccauccugagcaccuuccaccuguccauccccaacuucaaccaguacgaggccaugagcugcgacuucaacgggggcaagaucuccgugcaguacaaccucagccacgccuacgcgguggacgccgccgagcacugcgggaccgucgccaacggcgugcugcagaccuucaugcggauggcguggggcggguccuacaucgcccuggacagcggccgcgggaacugggacugcaucaugacguccuaccaguaccucaucauccagaacaccaccugggaggaccacugccaguucagccggcccucccccaucggcuaccuggggcugcucagccagcgcacccgggacaucuacaucagccgccggcugcugggcacguucaccuggacccucuccgacagcgagggcaacgagacccccgggggcuacugccugacgcgcuggaugcugaucgaggccgagcucaagugcuucgggaacaccgccguggccaagugcaacgagaagcacgacgaggaguucugcgacaugcugcggcuguucgacuucaacaagcaggcgauccagcgccucaaguccgaggcccagaugagcauccagcugaucaacaaggccgucaacgcccugaucaacgaccagcucaucaugaagaaccaccuccgggacaugaugggcauccccuacugcaacuacuccaaguacugguaccugaaccacaccagcuccgggcgcaccagccugcccaagugcuggcugguguccaacggcagcuaccugaacgagacgcacuucuccgacgacaucgagcagcaggccgacaacaugaucaccgagaugcuccagaaggaguacaucgaccggcagggcaagaccccgcuggggcugguggaccucuucgucuucagcaccuccuucuaccugaucagcaucuuccugcaccugaucaagaucccgugaggacuaguuauaagacugacuagcccgaugggccucccaacgggcccuccuccccuccuugcaccgagauuaaucaaaggcucuuuucagagccaccaaaaaaaaaaaaaaaaaaaaaaaaaaaaaaaaaaaaaaaaaaaaaaaaaaaaaaaaaaaaaaaaaaaaaaaaaaaaaaaaaaaaaaaaaaaaaaaaaaaaa

SEQ ID NO: 43051 - RNA, 1572 nt, Artificial Sequence
  mRNA product Design i-3 (hSL-A100) comprising derived and/or modified sequence from LASV(KAK-428;Clade n.d. (VII))__ANH09740__GPCmut13 (opt1)
aggagaaagcuuaccaugggccagaucgugaccuucuuccaggaggucccccacgugaucgaggaggugaugaacaucguccugaucgcccucagccugcuggccauccucaaggggcuguacaacuucgcgaccugcggcgugaucgggcugaucacguuccuccugcugugcggccgcuccugcagcgccaccuacaaggggcaguacgagcuccagacccuggagcugaacauggagucccucaacaugaccaugccgcugagcugcacgaagaacaacucccaccacuacauccgggccggcaacaacaccggccuggagcucacccugaccaacacgagcaucaucucccacaaguucugcaaccugagcgacgcccacaagaagaaccucuacgaccacacccugauguccaucaucaccaccuuccaccugagcauccccaacuucaaccaguacgaggccauguccugcgacuucaacgggggcaagaucagcauccaguacaaccucucccacagcuacgcgggggacgccgcccagcacugcggcacgguggccaacgggguccugcagaccuucaugcgcauggcguggggcggcuccuaccuggcccucgacagcgggcggcgcggcugggacugcaucaucuccagcuaccaguaccugaucauccagaacaccaccugggacgaccacugccaguucucccggcccagccccaucggguaccugggcuucgugagccagaagacgcgcgacaucuacaucucccggcgccuccugggcaccuucaccuggacccugagcgacuccgaggggcacgacaugccgggcggguacugccucacgcgguggaugcugaucgaggccgaccugaagugcuucggcaacaccgccguggccaagugcaacgagaagcacgacgaggaguucugcgacauguggcgccucuucgacuucaacaagcaggcgauccagcggcugaaggccgaggcccagaugaacauccagcugaucaacaaggccgucaacgcccucaucaacgaccagcugaugaugaagaaccaccuccgcgacaucauggggauccccuacugcaacuacagcaaguucugguaccugaacaacaccaccacgggccggaccucccugccccgcugcuggcugaucagcaacggcuccuaccucaacgagacccacuucagcgacgacaucgagcagcaggcggacaacaugaucaccgagaugcugcagaaggaguacauggaccggcaggggaagacgccccugggccucguggaccuguucguguucuccaccagcuucuaccugaucaccaucuuccuccaccuggucaagaucccgugaggacuaguuauaagacugacuagcccgaugggccucccaacgggcccuccuccccuccuugcaccgagauuaaucaaaggcucuuuucagagccaccaaaaaaaaaaaaaaaaaaaaaaaaaaaaaaaaaaaaaaaaaaaaaaaaaaaaaaaaaaaaaaaaaaaaaaaaaaaaaaaaaaaaaaaaaaaaaaaaaaaaa

SEQ ID NO: 43052 - RNA, 1572 nt, Artificial Sequence; identical to SEQ ID NO: 43046
  mRNA product Design i-3 (hSL-A100) comprising derived and/or modified sequence from LASV(Pinneo-NIG-1969;Clade I)__AIT17836__GPCmut13 (opt1)

SEQ ID NO: 43053 - RNA, 1572 nt, Artificial Sequence
  mRNA product Design i-3 (hSL-A100) comprising derived and/or modified sequence from LASV(ISTH0009-NIG-2011;Clade II)__AIT17404__GPCmut13 (opt1)
aggagaaagcuuaccaugggccagaucaucaccuucuuccaggaggugccccacgucaucgaggaggugaugaacaucgugcugaucgcccucagccugcuggccauccucaaggggaucuacaacgucgcgaccugcggccuguucgggcugguguccuuccuccugcugugcggccgcagcugcuccacgaccuacaaggggguguacgagcuccagacccuggagcuggacauggccagccucaacaugaccaugccgcuguccugcacgaagaacaacagccaccacuacaucauggucggcaacgagaccggccuggagcucacccugaccaacacguccaucaucaaccacaaguucugcaaccugagcgacgcccacaagaagaaccucuacgaccacgcccugauguccaucaucagcaccuuccaccuguccauccccaacuucaaccaguacgaggccaugagcugcgacuucaacgggggcaagaucuccgugcaguacaaccucagccacgcguacgccguggacgccgccaaccacugcgggaccaucgcgaacggcguccugcagaccuucaugcggauggccuggggcggguccuacaucgcccuggacagcggcaagggguccugggacugcaucaugacgagcuaccaguaccucaucauccagaacaccaccugggaggaccacugccaguucucccgccccagccccaucggcuaccuggggcugcucagccagcggacccgcgacaucuacaucucccggcgccugcugggcacguucaccuggacccucagcgacuccgagggcaacgagacccccgggggcuacugccugacgcgguggaugcugaucgaggccgagcucaagugcuucgggaacaccgccguggcgaagugcaacgagaagcacgacgaggaguucugcgacaugcugcgccuguucgacuucaacaagcaggccauccggcgccucaagaccgaggcccagaugagcauccagcugaucaacaaggccgugaacgcccugaucaacgaccagcucaucaugaagaaccaccuccgggacaucaugggcaucccguacugcaacuacuccaaguacugguaccugaaccacaccgucacggggaagaccagccugccccgcugcuggcugguguccaacggcagcuaccugaacgagacccacuucuccgacgacaucgagcagcaggcggacaacaugaucaccgagcuccugcagaaggaguacauggaccggcagggcaagacgccccuggggcucguggaccuguucgucuucagcaccuccuucuaccugaucagcaucuuccugcaccucaucaagaucccgugaggacuaguuauaagacugacuagcccgaugggccucccaacgggcccuccuccccuccuugcaccgagauuaaucaaaggcucuuuucagagccaccaaaaaaaaaaaaaaaaaaaaaaaaaaaaaaaaaaaaaaaaaaaaaaaaaaaaaaaaaaaaaaaaaaaaaaaaaaaaaaaaaaaaaaaaaaaaaaaaaaaaa

SEQ ID NO: 43054 - RNA, 1572 nt, Artificial Sequence
  mRNA product Design i-3 (hSL-A100) comprising derived and/or modified sequence from LASV(ISTH2010-NIG-2012;Clade II)__AIT17482__GPCmut13 (opt1)
aggagaaagcuuaccaugggccagaucaucaccuucuuccaggaggugccccacgucaucgaggaggugaugaacaucgugcugaucgcccucagccugcuggccauccucaaggggaucuacaacgucgcgaccugcggccuguucgggcugguguccuuccuccugcugugcggccgcagcugcuccacgaccuacaaggggguguacgagcuccagacccuggagcuggacauggccagccucaacaugaccaugccgcuguccugcacgaagaacaacagccaccacuacaucauggucggcaacgagaccggccuggagcucacccugaccaacacguccaucaucaaccacaaguucugcaaccugagcgacgcccacaagaagaaccucuacgaccacgcccugauguccaucaucagcaccuuccaccuguccauccccaacuucaaccaguacgaggccaugagcugcgacuucaacgggggcaagaucuccgugcaguacaaccucagccacgcguacgccguggacgccgccaaccacugcgggaccaucgcgaacggcguccugcagaccuucaugcggauggccuggggcggguccuacaucgcccuggacagcggcaagggguccugggacugcaucaugacgagcuaccaguaccucaucauccagaacaucaccugggaggaccacugccaguucucccgccccagccccaucggcuaccuggggcugcucagccagcggacccgcgacaucuacaucucccggcgccugcugggcaccuucacguggacccucagcgacuccgagggcaacgagacccccgggggcuacugccugacccgguggaugcugaucgaggccgagcucaagugcuucgggaacacggccguggcgaagugcaacgagaagcacgacgaggaguucugcgacaugcugcgccuguucgacuucaacaagcaggccauccggcgccucaagaccgaggcccagaugagcauccagcugaucaacaaggccgugaacgcccugaucaacgaccagcucaucaugaagaaccaccuccgggacaucaugggcauccccuacugcaacuacuccaaguacugguaccugaaccacaccgucaccgggaagacgagccugccccgcugcuggcugguguccaacggcagcuaccugaacgagacccacuucuccgacgacaucgagcagcaggcggacaacaugaucaccgagcuccugcagaaggaguacaucgaccggcagggcaagaccccgcuggggcucguggaccuguucgucuucagcacguccuucuaccugaucagcaucuuccugcaccucgugaagaucccgugaggacuaguuauaagacugacuagcccgaugggccucccaacgggcccuccuccccuccuugcaccgagauuaaucaaaggcucuuuucagagccaccaaaaaaaaaaaaaaaaaaaaaaaaaaaaaaaaaaaaaaaaaaaaaaaaaaaaaaaaaaaaaaaaaaaaaaaaaaaaaaaaaaaaaaaaaaaaaaaaaaaaa

SEQ ID NO: 43055 - RNA, 1572 nt, Artificial Sequence
  mRNA product Design i-3 (hSL-A100) comprising derived and/or modified sequence from LASV(Lassa virus/H.sapiens-wt/NGA/2015/ISTH_0543;Clade II)__AVO03639__GPCmut13 (opt1)
aggagaaagcuuaccaugggccagaucaucaccuucuuccaggaggugccccacgucaucgaggaggugaugaacaucgugcugaucgcccucagccugcuggccauccucaaggggaucuacaacgucgcgaccugcggccuguucgggcugguguccuuccuccugcugugcggccgcagcugcuccacgaccuacaaggggguguacgagcuccagacccuggagcuggacauggccaaccucaacaugaccaugccgcugagcugcacgaagaacaacucccaccacuacaucauggucggcaacgagaccggccuggagcucacccugaccaacacgagcaucaucaaccacaaguucugcaaccuguccgacgcccacaagaagaaccucuacgaccacgcccugaugagcaucaucuccaccuuccaccugagcauccccaacuucaaccaguacgaggccauguccugcgacuucaacgggggcaagaucagcgugcaguacaaccucucccacaccuacgcgguggacgccgccaaccacugcgggaccaucgccaacggcguccugcagacguucaugcggauggcguggggcgggagcuacaucgcccuggacuccggcaaggggagcugggacugcaucaugaccuccuaccaguaccucgugauccagaacaccaccugggaggaccacugccaguucagccgccccucccccaucggcuaccuggggcugcucagccagcggacgcgcgacaucuacaucagccggcgccugcugggcaccuucaccuggacccucuccgacagcgagggcaacgagacgcccgggggcuacugccugacccgguggaugcugaucgaggccgagcucaagugcuucgggaacaccgccguggccaagugcaacgagaagcacgacgaggaguucugcgacaugcugcgccuguucgacuucaacaagcaggcgauccggcgccucaagaccgaggcccagauguccauccagcugaucaacaaggccgucaacgcccugaucaacgaccagcucaucaugaagaaccaccuccgggacaucaugggcauccccuacugcaacuacagcaaguacugguaccugaaccacacggugaccgggaagaccucccugccccgcugcuggcuggugagcaacggcuccuaccugaacgagacccacuucagcgacgacaucgagcagcaggccgacaacaugaucacggagcuccugcagaaggaguacaucgaccggcagggcaagaccccgcuggggcucgucgaccuguucguguucuccaccagcuucuaccugaucuccaucuuccugcaccucgugaagaucccgugaggacuaguuauaagacugacuagcccgaugggccucccaacgggcccuccuccccuccuugcaccgagauuaaucaaaggcucuuuucagagccaccaaaaaaaaaaaaaaaaaaaaaaaaaaaaaaaaaaaaaaaaaaaaaaaaaaaaaaaaaaaaaaaaaaaaaaaaaaaaaaaaaaaaaaaaaaaaaaaaaaaaa

SEQ ID NO: 43056 - RNA, 1572 nt, Artificial Sequence
  mRNA product Design i-3 (hSL-A100) comprising derived and/or modified sequence from LASV(Lassa virus/H.sapiens-wt/NGA/2016/ISTH_0009;Clade II)__AVO03571__GPCmut13 (opt1)
aggagaaagcuuaccaugggccagaucaucaccuucuuccaggaggugccccacgucaucgaggaggugaugaacaucgugcugaucgcccucagccugcuggccauccucaaggggaucuacaacgucgcgaccugcggccugcuggggcucguguccuuccugcugcucugcggccgcagcugcuccacgaccuacaaggggguguacgagcugcagacccuggagcucgacauggccagccugaacaugaccaugccgcuguccugcacgaagaacaacagccaccacuacaucauggucggcaacgagaccggccucgagcugacccugaccaacacguccaucaucaaccacaaguucugcaaccucagcgacgcccacaagaagaaccuguacgaccacgcccugauguccaucaucagcaccuuccaccucuccauccccaacuucaaccaguacgaggccaugagcugcgacuucaacgggggccggaucuccgugcaguacaaccugagccacuccuacgcgguggacgccgccaaccacugcgggaccaucgccaacggcguccugcagaccuucaugcgcauggcguggggcgggagcuacaucgcccucgacuccggcaaggggagcugggacugcaucaugacguccuaccaguaccugaucauccagaacaccaccugggaggaccacugccaguucagccggcccagccccaucggcuaccuggggcuccugucccagcgcacccgggacaucuacaucagccgccggcugcucggcacguucaccuggacccuguccgacagcgagggcaacgagacccccgggggcuacugccugacgcgcuggaugcucaucgaggccgagcugaagugcuucgggaacaccgccguggccaagugcaacgagaagcacgacgaggaguucugcgacaugcugcggcuguucgacuucaacaagcaggcgauccgccggcugaagaccgaggcccagauguccauccagcugaucaacaaggccgugaacgcccucaucaacgaccagcugaucaugaagaaccaccuccgcgacaucaugggcaucccguacugcaacuacagcaaguacugguaccucaaccacaccgucacggggaagaccucccugccccggugcuggcuggugagcaacggcuccuaccucaacgagacccacuucagcgacgacaucgagcagcaggccgacaacaugaucaccgagcugcugcagaaggaguacaucgaccgccagggcaagacgccccucgggcugguggaccuguucgucuucuccaccagcuucuaccugaucuccaucuuccuccaccuggugaagaucccgugaggacuaguuauaagacugacuagcccgaugggccucccaacgggcccuccuccccuccuugcaccgagauuaaucaaaggcucuuuucagagccaccaaaaaaaaaaaaaaaaaaaaaaaaaaaaaaaaaaaaaaaaaaaaaaaaaaaaaaaaaaaaaaaaaaaaaaaaaaaaaaaaaaaaaaaaaaaaaaaaaaaaa

SEQ ID NO: 43057 - RNA, 1572 nt, Artificial Sequence
  mRNA product Design i-3 (hSL-A100) comprising derived and/or modified sequence from LASV(Lassa virus/H.sapiens-wt/NGA/2016/ISTH_0017;Clade II)__AVO03567__GPCmut13 (opt1)
aggagaaagcuuaccaugggccagaucaucaccuucuuccaggaggugccccacgucaucgaggaggugaugaacaucgugcugaucgcccucagccugcuggccauccucaaggggaucuacaacgucgcgaccugcggccuguucgggcugguguccuuccuccugcugugcggccgcagcugcuccacgaccuacaaggggguguacgagcuccagacccuggagcuggacauggccagccucaacaugaccaugccgcuguccugcacgaagaacaacagccaccacuacaucauggucggcaacgagaccggccuggagcucacccugaccaacacguccaucaucaaccacaaguucugcaaccugagcgacgcccacaagaagaaccucuacgaccacgcccugauguccaucaucagcaccuuccaccuguccauccccaacuucaaccaguacgaggccaugagcugcgacuucaacgggggcaagaucuccgugcaguacaaccucagccacaccuacgcgaucgacgccgccaaccacugcgggaccaucgccaacggcgugcugcagacguucaugcggauggcguggggcggguccuacaucgcccuggacagcggcaagggguccugggacugcaucaugaccagcuaccaguaccucaucauccagaacaccaccugggaggaccacugccaguucucccgccccagccccaucggcuaccuggggcugcucagccagcggacgcgcgacaucuacaucucccggcgccugcugggcaccuucaccuggacccucagcgacuccgagggcaacgagacgcccgggggcuacugccugacccgguggaugcugaucgaggccgagcucaagugcuucgggaacaccgccgucgccaagugcaacgagaagcacgacgaggaguucugcgacaugcugcgccuguucgacuucaacaagcaggcgauccggcgccucaagaccgaggcccagaugagcauccagcugaucaacaaggccgugaacgcccugaucaacgaccagcucaucaugaagaaccaccuccgggacaucaugggcauccccuacugcaacuacuccaaguacugguaccugaaccacacggugaccgggaagaccagccugccccgcugcuggcuggucuccaacggcagcuaccugaacgagacccacuucuccgacgacaucgagcagcaggccgacaacaugaucacggagcuccugcagaaggaguacauggaccggcagggcaagaccccgcuggggcucguggaccuguucguguucagcaccuccuucuaccugaucagcaucuuccugcaccucguccgcaucccgugaggacuaguuauaagacugacuagcccgaugggccucccaacgggcccuccuccccuccuugcaccgagauuaaucaaaggcucuuuucagagccaccaaaaaaaaaaaaaaaaaaaaaaaaaaaaaaaaaaaaaaaaaaaaaaaaaaaaaaaaaaaaaaaaaaaaaaaaaaaaaaaaaaaaaaaaaaaaaaaaaaaaa

SEQ ID NO: 43058 - RNA, 1572 nt, Artificial Sequence
  mRNA product Design i-3 (hSL-A100) comprising derived and/or modified sequence from LASV(Lassa virus/H.sapiens-wt/NGA/2018/ISTH_0959;Clade II)__AVV65099__GPCmut13 (opt1)
aggagaaagcuuaccaugggccagaucaucaccuucuuccaggaggugccccacgucaucgaggaggugaugaacaucgugcugaucgcccucagccugcuggccauccucaaggggaucuacaacgucgugaccugcggccuguucgggcugguguccuuccuccugcugugcggccgcagcugcuccacgaccuacaagggggucuacgagcuccagacccuggagcuggacauggcgagccucaacaugaccaugccgcuguccugcacgaagaacaacagccaccacuacaucauggugggcaacgagaccggccuggagcucacccugaccaacacguccaucaucaaccacaaguucugcaaccugagcgacgcccacaagaagaaccucuacgaccacgcccugauguccaucaucagcaccuuccaccuguccauccccaacuucaaccaguacgaggccaugagcugcgacuucaacgggggcaagaucuccgugcaguacaaccucagccacgccuacgcgaucgacgccgccaaccacugcgggaccaucgccaacggcguccugcagaccuucaugcggauggcguggggcggguccuacaucgcccuggacagcggcaagggguccugggacugcaucaugacgagcuaccaguaccucaucauccagaacaccaccugggaggaccacugccaguucucccgccccagccccaucggcuaccuggggcugcucagccagcggacccgcgacaucuacaucucccggcgccugcugggcacguucaccuggacccucagcgacuccgagggcaacgagacccccgggggcuacugccugacgcgguggaugcugaucgaggccgagcucaagugcuucgggaacaccgccguggccaagugcaacgagaagcacgacgaggaguucugcgacaugcugcgccuguucgacuucaacaagcaggcgauccggcgccucaagaccgaggcccagaugagcauccagcugaucaacaaggccgugaacgcccugaucaacgaccagcucaucaugaagaaccaccuccgggacaucaugggcaucccguacugcaacuacuccaaguacugguaccugaaccacaccgucacggggaagaccagccugccccgcugcuggcugguguccaacggcagcuaccugaacgagacccacuucuccgacgacaucgagcagcaggccgacaacaugaucaccgagcuccugcagaaggaguacaucgaccggcagggcaagacgccccuggggcucguggaccuguucgucuucagcaccuccuucuaccugaucagcaucuuccugcaccucgugaagaucccgugaggacuaguuauaagacugacuagcccgaugggccucccaacgggcccuccuccccuccuugcaccgagauuaaucaaaggcucuuuucagagccaccaaaaaaaaaaaaaaaaaaaaaaaaaaaaaaaaaaaaaaaaaaaaaaaaaaaaaaaaaaaaaaaaaaaaaaaaaaaaaaaaaaaaaaaaaaaaaaaaaaaaa

SEQ ID NO: 43059 - RNA, 1572 nt, Artificial Sequence
  mRNA product Design i-3 (hSL-A100) comprising derived and/or modified sequence from LASV(LASV003-NIG-2008;Clade II)__AIT17580__GPCmut13 (opt1)
aggagaaagcuuaccaugggccagaucaucaccuucuuccaggaggugccccacgucaucgaggaggugaugaacaucgugcugaucgcccucagccugcuggccauccucaaggggaucuacaacgucgcgaccugcggccuguucgggcugguguccuuccuccugcugugcggccgcagcugcuccacgaccuacaaggggguguacgagcuccagacccuggagcuggacauggccagccucaacaugaccaugccgcuguccugcacgaagaacaacagccaccacuacaucauggucggcaacgagaccggccuggagcucacccugaccaacacguccaucaucaaccacaaguucugcaaccugagcgacgcccacaagaagaaccucuacgaccacgcccugauguccaucaucagcaccuuccaccuguccauccccaacuucaaccaguacgaggccaugagcugcgacuucaacgggggcaagaucuccgugcaguacaaccucagccacaccuacgcgguggacgccgccaaccacugcgggaccaucgccaacggcguccugcagacguucaugcggauggcguggggcggguccuacaucgcccuggacagcggcaagggguccugggacugcaucaugaccagcuaccaguaccucaucauccagaacaccaccugggaggaccacugccaguucucccgccccagccccaucggcuaccuggggcugcucagccagcggacgcgcgacaucuacaucucccggcgccugcugggcaccuucaccuggacccucagcgacuccgagagcaacgagacgccgggcggguacugccugacccgguggaugcugaucgaggccgagcucaagugcuucggcaacaccgccguggccaagugcaacgagaagcacgacgaggaguucugcgacaugcugcgccuguucgacuucaacaagcaggcgauccggcgccucaaggccgaggcccagauguccauccagcugaucaacaaggccgugaacgcccugaucaacgaccagcucaucaugaagaaccaccuccgggacaucauggggauccccuacugcaacuacagcaaguacugguaccugaaccacaccgucacgggccgcaccucccugccccggugcuggcuggugagcaacggguccuaccugaacgagacccacuucagcgacgacaucgagcagcaggcggacaacaugaucaccgagcuccugcagaaggaguacauggaccgccagggcaagacgccccugggccucguggaccuguucgucuucuccaccagcuucuaccugaucuccaucuuccugcaccucgugaagaucccgugaggacuaguuauaagacugacuagcccgaugggccucccaacgggcccuccuccccuccuugcaccgagauuaaucaaaggcucuuuucagagccaccaaaaaaaaaaaaaaaaaaaaaaaaaaaaaaaaaaaaaaaaaaaaaaaaaaaaaaaaaaaaaaaaaaaaaaaaaaaaaaaaaaaaaaaaaaaaaaaaaaaaa

SEQ ID NO: 43060 - RNA, 1572 nt, Artificial Sequence
  mRNA product Design i-3 (hSL-A100) comprising derived and/or modified sequence from LASV(LASV035-NIG-2009;Clade II)__AIT17588__GPCmut13 (opt1)
aggagaaagcuuaccaugggccagaucaucaccuucuuccaggaggugccccacgucaucgaggaggugaugaacaucgugcugaucgcccucagccugcuggccauccucaaggggaucuacaacgucgcgaccugcggccuguucgggcugguguccuuccuccugcugugcggccgcagcugcuccacgaccuacaaggggguguacgagcuccagacccuggagcuggacauggccagccucaacaugaccaugccgcuguccugcacgaagaacaacagccaccacuacaucauggucggcaacgagaccggccuggagcucacccugaccaacacguccaucaucaaccacaaguucugcaaccugagcgacgcccacaagaagaaccucuacgaccacgcccugauguccaucaucagcaccuuccaccuguccauccccaacuucaaccaguacgaggccaugagcugcgacuucaacgggggcaagaucuccgugcaguacaaccucagccacgcguacgccguggacgccgccaaccacugcgggaccaucgcgaacggcguccugcagaccuucaugcggauggccuggggcggguccuacaucgcccuggacagcggcaagggguccugggacugcaucaugacgagcuaccaguaccucaucauccagaacaccaccugggaggaccacugccaguucucccgccccagccccaucggcuaccuggggcugcucagccagcggacccgcgacaucuacaucucccggcgccugcugggcacguucaccuggacccucagcgacuccgagggcaacgagacccccgggggcuacugccugacgcgguggaugcugaucgaggccgagcucaagugcuucgggaacaccgccguggcgaagugcaacgagaagcacgacgaggaguucugcgacaugcugcgccuguucgacuucaacaagcaggccauccggcgccucaaggccgaggcccagaugagcauccagcugaucaacaaggccgugaacgcgcugaucaacgaccagcucaucaugaagaaccaccuccgggacaucaugggcauccccuacugcaacuacuccaaguacugguaccugaaccacaccgucaccgggaagacgagccugccccgcugcuggcugguguccaacggcagcuaccugaacgagacccacuucuccgacgacaucgagcagcaggccgacaacaugaucaccgagcuccugcagaaggaguacaucgaccggcagggcaagaccccgcuggggcucguggaccuguucgucuucagcacguccuucuaccugaucagcaucuuccugcaccucgugaagaucccgugaggacuaguuauaagacugacuagcccgaugggccucccaacgggcccuccuccccuccuugcaccgagauuaaucaaaggcucuuuucagagccaccaaaaaaaaaaaaaaaaaaaaaaaaaaaaaaaaaaaaaaaaaaaaaaaaaaaaaaaaaaaaaaaaaaaaaaaaaaaaaaaaaaaaaaaaaaaaaaaaaaaaa

SEQ ID NO: 43061 - RNA, 1572 nt, Artificial Sequence
  mRNA product Design i-3 (hSL-A100) comprising derived and/or modified sequence from LASV(LASV1000-NIG-2009;Clade II)__AIT17782__GPCmut13 (opt1)
aggagaaagcuuaccaugggccagaucaucaccuucuuccaggaggugccccacgucaucgaggaggugaugaacaucgugcugaucgcccucagccugcuggccauccucaaggggaucuacaacgucgcgaccugcggccuguucgggcugguguccuuccuccugcugugcggccgcagcugcuccacgaccuacaaggggguguacgagcuccagacccuggagcuggacauggccagccucaacaugaccaugccgcuguccugcacgaagaacaacagccaccacuacaucauggucggcaacgagaccggccuggagcucacccugaccaacacguccaucaucaaccacaaguucugcaaccugagcgacgcccacaagaagaaccucuacgaccacgcccugauguccaucaucagcaccuuccaccuguccauccccaacuucaaccaguacgaggccaugagcugcgacuucaacgggggcaagaucuccgugcaguacaaccucagccacaccuacgcgguggacgccgccaaccacugcgggaccaucgccaacggcguccugcagacguucaugcggauggcguggggcggguccuacaucgcccuggacagcggcaagggguccugggacugcaucaugaccagcuaccaguaccucaucauccagaacaccaccugggaggaccacugccaguucucccgccccagccccaucggcuaccuggggcugcucagccagcggacgcgcgacaucuacaucucccggcgccugcugggcaccuucaccuggacccucagcgacuccgagggcaacgagacgcccgggggcuacugccugacccgguggaugcugaucgaggccgagcucaagugcuucgggaacaccgccguggccaagugcaacgagaagcacgacgaggaguucugcgacaugcugcgccuguucgacuucaacaagcaggcgaucaagcggcucaagaccgaggcccagaugagcauccagcugaucaacaaggccgugaacgcccugaucaacgaccagcucaucaugaagaaccaccuccgcgacaucaugggcauccccuacugcaacuacuccaaguacugguaccugaaccacacggucaccgggaagaccagccugccccggugcuggcugguguccaacggcagcuaccugaacgagacccacuucuccgacgacaucgagcagcaggccgacaacaugaucacggagcuccugcagaaggaguacaucgaccgccagggcaagaccccgcuggggcucguggaccuguucgucuucagcaccuccuucuaccugaucagcaucuuccugcaccucgugaagaucccgugaggacuaguuauaagacugacuagcccgaugggccucccaacgggcccuccuccccuccuugcaccgagauuaaucaaaggcucuuuucagagccaccaaaaaaaaaaaaaaaaaaaaaaaaaaaaaaaaaaaaaaaaaaaaaaaaaaaaaaaaaaaaaaaaaaaaaaaaaaaaaaaaaaaaaaaaaaaaaaaaaaaaa

SEQ ID NO: 43062 - RNA, 1572 nt, Artificial Sequence
  mRNA product Design i-3 (hSL-A100) comprising derived and/or modified sequence from LASV(LASV221-NIG-2010;Clade II)__AIT17624__GPCmut13 (opt1)
aggagaaagcuuaccaugggccagaucaucaccuucuuccaggaggugccccacgucaucgaggaggugaugaacaucgugcugaucgcccucagccugcuggccauccucaaggggaucuacaacgucgcgaccugcggccuguucgggcugguguccuuccuccugcugugcggccgcagcugcuccacgaccuacaaggggguguacgagcuccagacccuggagcuggacauggccagccucaacaugaccaugccgcuguccugcacgaagaacaacagccaccacuacaucauggucggcaacgagaccggccuggagcucacccugaccaacacguccaucaucaaccacaaguucugcaaccugagcgacgcccacaagaagaaccucuacgaccacgcccugauguccaucaucagcaccuuccaccuguccauccccaacuucaaccaguacgaggccaugagcugcgacuucaacgggggcaagaucuccgugcaguacaaccucagccacaccuacgcgaucgacgccgccaaccacugcgggaccaucgccaacggcgugcugcagacguucaugcggauggcguggggcggguccuacaucgcccuggacagcggcaagggguccugggacugcaucaugaccagcuaccaguaccucaucauccagaacaccaccugggaggaccacugccaguucucccgccccagccccaucggcuaccuggggcugcucagccagcggacgcgcgacaucuacaucucccggcgccugcugggcaccuucaccuggacccucagcgacuccgagggcaacgagacgcccgggggcuacugccugacccgguggaugcugaucgaggccgagcucaagugcuucgggaacaccgccgucgccaagugcaacgagaagcacgacgaggaguucugcgacaugcugcgccuguucgacuucaacaagcaggcgauccggcgccucaagaccgaggcccagaugagcauccagcugaucaacaaggccgugaacgcccugaucaacgaccagcucaucaugaagaaccaccuccgggacaucaugggcauccccuacugcaacuacuccaaguacugguaccugaaccacacggugaccgggaagaccagccugccccgcugcuggcuggucuccaacggcagcuaccugaacgagacccacuucuccgacgacaucgagcagcaggccgacaacaugaucacggagaugcuccagaaggaguacauggaccggcagggcaagaccccgcuggggcugguggaccucuucguguucagcaccuccuucuaccugaucagcaucuuccugcaccuggucaagaucccgugaggacuaguuauaagacugacuagcccgaugggccucccaacgggcccuccuccccuccuugcaccgagauuaaucaaaggcucuuuucagagccaccaaaaaaaaaaaaaaaaaaaaaaaaaaaaaaaaaaaaaaaaaaaaaaaaaaaaaaaaaaaaaaaaaaaaaaaaaaaaaaaaaaaaaaaaaaaaaaaaaaaaa

SEQ ID NO: 43063 - RNA, 1572 nt, Artificial Sequence
  mRNA product Design i-3 (hSL-A100) comprising derived and/or modified sequence from LASV(LASV237-NIG-2010;Clade II)__AIT17638__GPCmut13 (opt1)
aggagaaagcuuaccaugggccagaucaucaccuucuuccaggaggugccccacgucaucgaggaggugaugaacaucgugcugaucgcccucagccugcuggccauccucaaggggaucuacaacgucgcgaccugcggccuguucgggcugguguccuuccuccugcugugcggccgcagcugcuccacgaccuacaaggggguguacgagcuccagacccuggagcuggacauggccagccucaacaugaccaugccgcuguccugcacgaagaacaacagccaccacuacaucauggucggcaacgagaccggccuggagcucacccugaccaacacguccaucaucaaccacaaguucugcaaccugagcgacgcccacaagaaggaccucuacgaccacgcccugauguccaucaucagcaccuuccaccuguccauccccaacuucaaccaguacgaggccaugagcugcgacuucaacgggggcaagaucuccgugcaguacaaccucagccacaccuacgcgguggacgccgccaaccacugcgggaccaucgccaacggcguccugcagacguucaugcggauggcguggggcggguccuacaucgcccuggacagcggcaagggguccugggacugcaucaugaccagcuaccaguaccucaucauccagaacaccaccugggaggaccacugccaguucucccgccccagccccaucggcuaccuggggcugcucagccagcggacgcgcgacaucuacaucucccggcgccugcugggcaccuucaccuggacccucagcgacuccgagggcaacgagacgcccgggggcuacugccugacccgguggaugcugaucgaggccgagcucaagugcuucgggaacaccgccguggccaagugcaacgagaagcacgacgaggaguucugcgacaugcugcgccuguucgacuucaacaagcaggcgauccggcgccucaagaccgaggcccagaugagcauccagcugaucaacaaggccgugaacgcccugaucaacgaccagcucaucaugaagaaccaccuccgggacaucaugggcauccccuacugcaacuacuccaaguacugguaccugaaccacacggucaccgggaagaccagccugccccgcugcuggcugguguccaacggcagcuaccugaacgagacccacuucuccgacgacaucgagcagcaggccgacaacaugaucacggagcuccugcagaaggaguacauggaccggcagggcaagaccccgcuggggcucguggaccuguucgucuucagcaccuccuucuaccugaucagcaucuuccugcaccucaucaagaucccgugaggacuaguuauaagacugacuagcccgaugggccucccaacgggcccuccuccccuccuugcaccgagauuaaucaaaggcucuuuucagagccaccaaaaaaaaaaaaaaaaaaaaaaaaaaaaaaaaaaaaaaaaaaaaaaaaaaaaaaaaaaaaaaaaaaaaaaaaaaaaaaaaaaaaaaaaaaaaaaaaaaaaa

SEQ ID NO: 43064 - RNA, 1572 nt, Artificial Sequence
  mRNA product Design i-3 (hSL-A100) comprising derived and/or modified sequence from LASV(LASV253-NIG-2011;Clade II)__AIT17670__GPCmut13 (opt1)
aggagaaagcuuaccaugggccagaucaucaccuucuuccaggaggugccccacgucaucgaggaggugaugaacaucgugcugaucgcccucagccugcuggccauccucaaggggaucuacaacgucgcgaccugcggccuguucgggcugguguccuuccuccugcugugcggccgcagcugcuccacgaccuacaaggggguguacgagcuccagacccuggagcuggacauggccagccucaacaugaccaugccgcuguccugcacgaagaacaacagccaccacuacaucauggucggcaacgagaccggccuggagcucacccugaccaacacguccaucaucaaccacaaguucugcaaccugagcgacgcccacaagaagaaccucuacgaccacgcccugauguccaucaucagcaccuuccaccuguccauccccaacuucaaccaguacgaggccaugagcugcgacuucaacgggggcaagaucuccgugcaguacaaccucagccacaccuacgcgguggacgccgccaaccacugcgggaccaucgccaacggcguccugcagacguucaugcggauggcguggggcggguccuacaucgcccuggacagcggcaagggguccugggacugcaucaugaccagcuaccaguaccucaucauccagaacaccaccugggaggaccacugccaguucucccgccccagccccaucggcuaccuggggcugcucagccagcggacgcgcgacaucuacaucucccggcgccugcugggcaccuucaccuggacccucagcgacuccgagggcaacgagacgcccgggggcuacugccugacccgguggaugcugaucgaggccgagcucaagugcuucgggaacaccgccguggccaagugcaacgagaagcacgacgaggaguucugcgacaugcugcgccuguucgacuucaacaagcaggcgauccggcgccucaaggccgaggcccagaugagcauccagcugaucaacaaggccgugaacgcccugaucaacgaccagcucaucaugaagaaccaccuccgggacaucaugggcaucccguacugcaacuacuccaaguacugguaccugaaccacaccgucacggggcgcaccagccugccccggugcuggcugguguccaacggcagcuaccugaacgagacccacuucuccgacgacaucgagcagcaggcggacaacaugaucaccgagcuccugcagaaggaguacaucgaccgccagggcaagacgccccuggggcucguggaccuguucgucuucagcaccuccuucuaccugaucagcaucuuccugcaccucgugaagaucccgugaggacuaguuauaagacugacuagcccgaugggccucccaacgggcccuccuccccuccuugcaccgagauuaaucaaaggcucuuuucagagccaccaaaaaaaaaaaaaaaaaaaaaaaaaaaaaaaaaaaaaaaaaaaaaaaaaaaaaaaaaaaaaaaaaaaaaaaaaaaaaaaaaaaaaaaaaaaaaaaaaaaaa

SEQ ID NO: 43065 - RNA, 1572 nt, Artificial Sequence
  mRNA product Design i-3 (hSL-A100) comprising derived and/or modified sequence from LASV(LASV254-NIG-2011;Clade II)__AIT17674__GPCmut13 (opt1)
aggagaaagcuuaccaugggccagaucaucaccuucuuccaggaggugccccacgucaucgaggaggugaugaacaucgugcugaucgcccucagccugcuggccauccucaaggggaucuacaacgucgcgaccugcggccuguucgggcugguguccuuccuccugcugugcggccgcagcugcuccacgaccuacaaggggguguacgagcuccagacccuggagcuggacaugaccaaccucaacaugacgaugccgcugagcugcaccaagaacaacucccaccacuacaucauggucggcaacgagaccggccuggagcucacccugacgaacaccagcaucaucaaccacaaguucugcaaccuguccgacgcccacaagaagaaccucuacaaccacgcccugaugagcaucaucuccaccuuccaccugagcauccccaacuucaaccaguacgaggccauguccugcgacuucaacgggggcaagaucagcgugcaguacaaccucucccacagcuacgccguggacgcggccaaccacugcgggaccaucgccaacggcguccugcagacguucaugcggauggccuggggcggguccuacaucgcgcuggacagcggcaaggggaacugggacugcaucaugaccuccuaccaguaccucaucauccagaacaccaccugggaggaccacugccaguucagccgccccucccccaucggcuaccuggggcugcucagccagcggacgcgcgacaucuacaucagccggcgccugcugggcaccuucaccuggacccucuccgacagcgagggcaacgagacgcccgggggcuacugccugacccgguggaugcugaucgaggccgagcucaagugcuucgggaacaccgccguggccaagugcaacgagaagcacgacgaggaguucugcgacaugcugcgccuguucgacuucaacaagcaggccauccggcgccucaagaccgaggcgcaggccaacauccagcugaucaacaaggccgugaacgcccugaucaacgaccagcucaucaugaagaaccaccuccgggacaucaugggcauccccuacugcaacuacuccaaguacugguaccugaaccacacggucaccgggaagaccagccugccccgcugcuggcugguguccaacggcagcuaccugaacgagacccacuucuccgacgacaucgagcagcaggccgacaacaugaucacggagcuccugcagaaggaguacauggaccggcagggcaagaccccgcuggggcucguggaccuguucgucuucagcaccuccuucuaccugaucagcaucuuccugcaccucgugaagaucccgugaggacuaguuauaagacugacuagcccgaugggccucccaacgggcccuccuccccuccuugcaccgagauuaaucaaaggcucuuuucagagccaccaaaaaaaaaaaaaaaaaaaaaaaaaaaaaaaaaaaaaaaaaaaaaaaaaaaaaaaaaaaaaaaaaaaaaaaaaaaaaaaaaaaaaaaaaaaaaaaaaaaaa

SEQ ID NO: 43066 - RNA, 1572 nt, Artificial Sequence
  mRNA product Design i-3 (hSL-A100) comprising derived and/or modified sequence from LASV(Nig08-A19;Clade III)__ADU56618__GPCmut13 (opt1)
aggagaaagcuuaccaugggccagaucgugaccuucuuccaggaggucccccacgugaucgaggaggugaugaacaucguccugaucgcccucagcauccuggccauccugaaggggcucuacaacaucgcgaccugcggccugaucgggcuggugacguuccuccugcuguccggccgcagcugcuccaugaccuacaaggggguguacgagcuccagacccuggagcugaacaugaacacccucaacaugacgaugccgcugagcugcaccaagaacaacucccaccacuacaucauggucggcaacgagaccggccuggagcucacccugacgaacaccagccugcuccaccacaaguucugcaaccuguccgacgcccacaagaagaaccuguacgaccacacccucaugagcaucaucuccaccuuccaccugagcauccccaacuucaaccaguacgaggccauguccugcgacuucaacgggggcaagaucacggugcaguacaaccugagccacuccuacgccaucgacgccgcgaaccacugcgggaccguggccaacggcguccuccagaccuucaugcggauggccuggggcgggagcuacaucgcccuggacuccggccgcgggaagugggacugcaucaugaccagcuaccaguaccugaucauccagaacacgaccugggaggaccacugccaguucucccggcccagccccaucggcuaccucgggcugcugucccagcgcacccgggacaucuacaucagccgccggcuccugggcaccuucacguggacccugagcgacuccgagggcaacgagacccccgggggcuacugccucacccgcuggaugcugaucgaggcggagcugaagugcuucgggaacacggccguggccaagugcaacgagaagcacgacgaggaguucugcgacaugcuccggcuguucgacuucaacaagcaggccauccgccggcugaaggccgaggcgcagaugagcauccagcucaucaacaaggccgugaacgcccugaucaacgaccagcugaucaugaagaaccaccuccgcgacaucaugggcauccccuacugcaacuacuccaaguacugguaccugaaccacaccagcaccgggcggaccucccugccccgcugcuggcucgucagcaacggcuccuaccugaacgagacgcacuucagcgacgacaucgagcagcaggccgacaacaugaucaccgagaugcugcagaaggaguaccucgaccggcagggcaagaccccgcuggggcugguggaccuguucguguucuccaccagcuucuaccucaucuccaucuuccugcaccuggucaagaucccgugaggacuaguuauaagacugacuagcccgaugggccucccaacgggcccuccuccccuccuugcaccgagauuaaucaaaggcucuuuucagagccaccaaaaaaaaaaaaaaaaaaaaaaaaaaaaaaaaaaaaaaaaaaaaaaaaaaaaaaaaaaaaaaaaaaaaaaaaaaaaaaaaaaaaaaaaaaaaaaaaaaaaa

SEQ ID NO: 43067 - RNA, 1575 nt, Artificial Sequence
  mRNA product Design i-3 (hSL-A100) comprising derived and/or modified sequence from LASV(G1180-SLE-2010;Clade IV)__AIT17168__GPCmut13 (opt1)
aggagaaagcuuaccaugggccagaucgugaccuucuuccaggaggucccccacgugaucgaggaggugaugaacaucguccugaucgcccucagcauccuggccgugcugaaggggcucuacaacuucgcgaccugcggccugguggggcugcucaccuuccugcugcucugcggccgcuccugcaccgccagccgguacaagggggucuacgagcugcagacccuggagcucaacauggagacccugaacaugacgaugccgcuguccugcaccaagaacaacagccaccacuacaucauggugggcaacgagaccggccucgagcugacccugacgaacaccuccaucaucaaccacaaguucugcaaccucagcgacgcccacaagaagaaccuguacgaccacgcccugauguccaucaucagcaccuuccaccucuccauccccaacuucaaccaguacgaggccaugagcugcgacuucaacgggggcaagaucuccgugcaguacaaccugagccacuccuacgcgggggacgccgccaaccacugcggcaccgucgccaacggggugcugcagacguucaugcgcauggcguggggcggcagcuacaucgcccucgacuccgggcacggcagcugggacugcaucaugaccuccuaccaguaccugaucauccagaacaccaccugggaggaccacugccaguucagccggcccucccccaucggguaccugggccuccugagccagcgcacgcgggacaucuacaucagccgccggcugcucggcaccuucaccuggacccuguccgacagcgaggggaaggacacgccgggcggguacugccugacccgcuggaugcucaucgaggccgagcugaagugcuucggcaacaccgccguggccaagugcaacgagaagcacgacgaggaguucugcgacaugcugcggcuguucgacuucaacaagcaggcgauccagcgccugaaggccgaggcccagauguccauccagcugaucaacaaggccgucaacgcccucaucaacgaccagcugaucaugaagaaccaccuccgggacaucauggggauccccuacugcaacuacagcaaguacugguaccucaaccacaccacgaccggcaagaccucccugcccaagugcuggcuggugagcaacggcuccuaccucaacgagacccacuucagcgacgacaucgagcagcaggcggacaacaugaucacggagaugcugcagaaggaguacauggagcgccaggggaagacgccccugggccucguggaccuguucgucuucuccaccagcuucuaccugaucuccaucuuccugcaccucgugaagaucccgugaggacuaguuauaagacugacuagcccgaugggccucccaacgggcccuccuccccuccuugcaccgagauuaaucaaaggcucuuuucagagccaccaaaaaaaaaaaaaaaaaaaaaaaaaaaaaaaaaaaaaaaaaaaaaaaaaaaaaaaaaaaaaaaaaaaaaaaaaaaaaaaaaaaaaaaaaaaaaaaaaaaaa

SEQ ID NO: 43068 - RNA, 1575 nt, Artificial Sequence
  mRNA product Design i-3 (hSL-A100) comprising derived and/or modified sequence from LASV(G1442-SLE-2011;Clade IV)__AIT17180__GPCmut13 (opt1)
aggagaaagcuuaccaugggccagaucgugaccuucuuccaggaggucccccacgugaucgaggaggugaugaacaucguccugaucgcccucagcauccuggccgugcugaaggggcucuacaacguggcgaccugcggccugaucgggcuggucacguuccuccugcugugcggccgcuccugcaccaccacccucuacaaggggguguacgagcugcagacgcuggagcucaacauggagacccugaacaugaccaugccgcugagcugcaccaagaacaacucccaccacuacauccgggugggcaacgagacgggccucgagcugacccugaccaacaccagcaucaucaaccacaaguucugcaaccucuccgacgcccacaagaagaaccuguacgaccacgcccugaugagcaucaucuccacguuccaccucagcauccccaacuucaaccaguacgaggccauguccugcgacuucaacgggggcaagaucagcguccaguacaaccugucccacagcuacgccggggacgcggccaaccacugcggcaccguggccaacggggugcugcagaccuucaugcgcauggccuggggcggcuccuacaucgcgcucgacagcgggcggggcaacugggacugcaucaugaccuccuaccaguaccugaucauccagaacacgaccugggacgaccacugccaguucagccgccccucccccaucggguaccugggccuccugagccagcggacccgcgacgucuacaucucccggcgccugcucggcaccuucacguggacccugagcgacagcgaggggaaggacaccccgggcggguacugccugacccgguggaugcucaucgaggccgagcugaagugcuucggcaacacggccguggccaagugcaacgagaagcacgacgaggaguucugcgacaugcugcgccucuucgacuucaacaagcaggccauccagcggcugaaggcggaggcccagauguccauccagcugaucaacaaggccgugaacgcccucaucaacgaccagcugaucaugaagaaccaccuccgcgacaucauggggauccccuacugcaacuacagcaaguacugguaccugaacaacaccgccaccggcaagaccucccugcccaagugcuggcugaucagcaacggcuccuaccucaacgagacgcacuucagcgacgacaucgagcaggaggcggacaacaugaucaccgagaugcugcagaaggaguacauggagcggcaggggaagacgccccugggccucgucgaccuguucguguucuccaccagcuucuaccugaucuccaucuuccugcaccucgugaagaucccgugaggacuaguuauaagacugacuagcccgaugggccucccaacgggcccuccuccccuccuugcaccgagauuaaucaaaggcucuuuucagagccaccaaaaaaaaaaaaaaaaaaaaaaaaaaaaaaaaaaaaaaaaaaaaaaaaaaaaaaaaaaaaaaaaaaaaaaaaaaaaaaaaaaaaaaaaaaaaaaaaaaaaa

SEQ ID NO: 43069 - RNA, 1575 nt, Artificial Sequence
  mRNA product Design i-3 (hSL-A100) comprising derived and/or modified sequence from LASV(G3010-SLE-2013;Clade IV)__AIT17344__GPCmut13 (opt1)
aggagaaagcuuaccaugggccagaucgugaccuucuuccaggaggucccccacgugaucgaggaggugaugaacaucguccugaucgcccucagcauccuggccgugcugaaggggcucuacaacuucgcgaccugcggccugguggggcuggucacguuccuccugcugugcggccgcuccugcaccaccagccucuacaaggggguguacgagcugcagacccuggagcucaacauggagacgcugaacaugaccaugccgcuguccugcaccaagaacaacagccaccacuacaucauggugggcaacgagaccggccucgagcugacgcugaccaacaccuccaucaucaaccacaaguucugcaaccucagcgacgcccacaagaagaaccuguacaaccacgcccugauguccaucaucagcaccuuccaccucuccauccccaacuucaaccaguacgaggccaugagcugcgacuucaacgggggcaagaucuccguccaguacaaccugagccacuccuacgccggggacgcggccagccacugcggcacgguggccaacggggugcugcagaccuucaugcggauggccuggggcggcuccuacaucgcgcucgacagcggguacggcaagugggacugcaucaugaccuccuaccaguaccugaucauccagaacaccacgugggaggaccacugccaguucagccgccccucccccaucggguaccugggccuccugagccagcggacccgcgacaucuacaucagccggcgccugcucggcaccuucaccuggacgcuguccgacagcgaggggaaggacaccccgggcggguacugccugacccgguggaugcucaucgaggccgagcugaagugcuucggcaacaccgccgucgccaagugcaacgagaagcacgacgaggaguucugcgacaugcugcgccucuucgacuucaacaagcaggccauccagcggcugaagacggaggcgcagauguccauccagcugaucaacaaggccgugaacgcccucaucaacgaccagcugaucaugaagaaccaccuccgcgacaucauggggauccccuacugcaacuacagcaaguacugguaccugaaccacaccaccaccggcaagacgucccugcccaagugcuggcuggugagcaacggcuccuaccucaacgagacccacuucagcgacgacaucgagcagcaggccgacaacaugaucaccgagaugcugcagaaggaguacauggagcggcaggggaagacgccccugggccucgucgaccuguucguguucuccaccagcuucuaccugaucuccaucuuccugcaccucgugaagaucccgugaggacuaguuauaagacugacuagcccgaugggccucccaacgggcccuccuccccuccuugcaccgagauuaaucaaaggcucuuuucagagccaccaaaaaaaaaaaaaaaaaaaaaaaaaaaaaaaaaaaaaaaaaaaaaaaaaaaaaaaaaaaaaaaaaaaaaaaaaaaaaaaaaaaaaaaaaaaaaaaaaaaaa

SEQ ID NO: 43070 - RNA, 1575 nt, Artificial Sequence
  mRNA product Design i-3 (hSL-A100) comprising derived and/or modified sequence from LASV(G502-SLE-2009;Clade IV)__AIT17126__GPCmut13 (opt1)
aggagaaagcuuaccaugggccagaucgugaccuucuuccaggaggucccccacgugaucgaggaggugaugaacaucguccugaucgcccucagcauccuggccgugcugaaggggcucuacaacuucgcgaccugcggccugguggggcugcucacguuccugcugcucugcggccgcuccugcaccaccgggcuguacaagggcgucuacgagcugcagacccucgagcugaacauggagacgcugaacaugaccaugccgcucagcugcaccaagaacaacucccaccacuacaucauggugggcaacgagaccgggcuggagcugacgcucaccaacaccagcaucaucaaccacaaguucugcaaccuguccgacgcccacaagaagaaccuguacgaccacgcccucaugagcaucaucuccaccuuccaccugagcauccccaacuucaaccaguacgaggccauguccugcgacuucaacggcgggaagaucagcgugcaguacaaccugucccacagcuacgccggcgacgcggccgaccacugcgggacggucgccaacggcgugcuccagaccuucaugcggauggccuggggcggguccuacaucgcgcuggacagcggccgcgggcggugggacugcaucaugaccuccuaccaguaccugaucauccagaacaccacgugggaggaccacugccaguucagccgccccucccccaucggcuaccucggccugcugagccagcggacccgcgacaucuacaucucccggcgccuccuggggaccuucaccuggacgcugagcgacagcgagggcaaggacacccccgggggcuacugccucacccgguggaugcugaucgaggccgagcugaagugcuucgggaacaccgccguggccaagugcaacgagaagcacgacgaggaguucugcgacaugcuccgccuguucgacuucaacaagcaggccauccagcggcugaaggcggaggcccagauguccauccagcucaucaacaaggccgucaacgcccugaucaacgaccagcuggugaugaagaaccaccuccgcgacaucaugggcauccccuacugcaacuacagccgguacugguaccugaaccacacgaccaccggccgcaccucccugcccaagugcuggcucgugagcaacggguccuaccugaacgagacgcacuucagcgacgacaucgagcagcaggccgacaacaugaucaccgagaugcugcagaaggaguacauggagcggcagggcaagaccccgcucgggcuggucgaccuguucguguucuccaccagcuucuaccugaucuccaucuuccuccaccuggugaagaucccgugaggacuaguuauaagacugacuagcccgaugggccucccaacgggcccuccuccccuccuugcaccgagauuaaucaaaggcucuuuucagagccaccaaaaaaaaaaaaaaaaaaaaaaaaaaaaaaaaaaaaaaaaaaaaaaaaaaaaaaaaaaaaaaaaaaaaaaaaaaaaaaaaaaaaaaaaaaaaaaaaaaaaa

SEQ ID NO: 43071 - RNA, 1575 nt, Artificial Sequence
  mRNA product Design i-3 (hSL-A100) comprising derived and/or modified sequence from LASV(G733-SLE-2010;Clade IV)__AIT17154__GPCmut13 (opt1)
aggagaaagcuuaccaugggccagaucgugaccuucuuccaggaggucccccacgugaucgaggaggugaugaacaucguccugaucgcccucagcauccuggccgugcugaaggggcucuacaacuucgcgaccugcggcaucguggggcuggucuccuuccugcuccugugcggccgcagcugcacgaccucccuguacaaggggguguacgagcuccagacccuggagcugaacauggagacccucaacaugacgaugccgcugagcugcaccaagaacaacucccaccacuacaucauggugggcaacgagaccggccuggagcucacccugacgaacaccagcaucaucaaccacaaguucugcaaccuguccgacgcccacaagaagaaccucuacgaccacgcccugaugagcaucaucuccaccuuccaccugagcauccccaacuucaaccaguacgaggccauguccugcgacuucaacgggggcaagaucagcguccaguacaaccucucccacagcuacgccggggacgcggccaaccacugcggcaccaucgccaacggggugcugcagacguucaugcggauggccuggggcggcuccuacaucgcgcuggacagcgggcgcgaccggugggacugcaucaugaccuccuaccaguaccucaucauccagaacaccaccugggaggaccacugccaguucagccgccccucccccaucggcuaccuggggcugcucagccagcggacgcgcgacaucuacaucagccggcgccugcugggcaccuucaccuggacccucuccgacagcgagggcaaggacacgcccgggggcuacugccugacccgguggaugcugaucgaggccgagcucaagugcuucgggaacaccgccguggccaagugcaacgagaagcacgacgaggaguucugcgacaugcugcgccuguucgacuucaacaagcaggccauccagcggcucaaggcggaggcccagauguccauccagcugaucaacaaggccgucaacgcccugaucaacgaccagcucaucaugaagaaccaccuccgcgacaucaugggcauccccuacugcaacuacagcaaguacugguaccugaaccacaccacgaccgggaagaccucccugcccaagugcuggcuggugagcaacggcuccuaccugaacgagacccacuucagcgacgacaucgagcagcaggccgacaacaugaucacggagaugcuccagaaggaguacauggagcggcagggcaagaccccgcuggggcugguggaccucuucgucuucuccaccagcuucuaccugaucuccaucuuccugcaccuggugaagaucccgugaggacuaguuauaagacugacuagcccgaugggccucccaacgggcccuccuccccuccuugcaccgagauuaaucaaaggcucuuuucagagccaccaaaaaaaaaaaaaaaaaaaaaaaaaaaaaaaaaaaaaaaaaaaaaaaaaaaaaaaaaaaaaaaaaaaaaaaaaaaaaaaaaaaaaaaaaaaaaaaaaaaaa

SEQ ID NO: 43072 - RNA, 1575 nt, Artificial Sequence
  mRNA product Design i-3 (hSL-A100) comprising derived and/or modified sequence from MOPV/LASV reassortant(IGS-1;Clade IV)__AFY05576__GPCmut13 (opt1)
aggagaaagcuuaccaugggccagaucgugaccuucuuccaggaggucccccacgugaucgaggaggugaugaacaucguccugaucgcccucagcgugcuggccgugcugaaggggcucuacaacuucgcgaccugcggccuggucgggcuggugacguuccuccugcugugcggccgcuccugcaccaccagccucuacaaggggguguacgagcugcagacccuggagcucaacauggagacgcugaacaugaccaugccgcuguccugcaccaagaacaacagccaccacuacaucauggucggcaacgagaccggccucgagcugacgcugaccaacaccuccaucaucaaccacaaguucugcaaccucagcgacgcccacaagaagaaccuguacgaccacgcccugauguccaucaucagcaccuuccaccucuccauccccaacuucaaccaguacgaggccaugagcugcgacuucaacgggggcaagaucuccgugcaguacaaccugagccacuccuacgccggggacgcggccaaccacugcggcacgguggccaacgggguccugcagaccuucaugcggauggccuggggcggcagcuacaucgcgcucgacuccgggcgcggcaacugggacugcaucaugaccagcuaccaguaccugaucauccagaacaccacgugggaggaccacugccaguucucccggcccagccccaucggguaccugggccuccugucccagcgcacccgggacaucuacaucagccgccggcugcucggcaccuucaccuggacgcugagcgacuccgagggggaggacaccccgggcggguacugccugacccgcuggaugcucaucgaggccgagcugaagugcuucggcaacaccgccguggccaagugcaacgagaagcacgacgaggaguucugcgacaugcugcggcuguucgacuucaacaagcaggccauccagcgccugaaggcggaggcccagaugagcauccagcugaucaacaaggccgugaacgcccucaucaacgaccagcugaucaugaagaaccaccuccgggacaucauggggauccccuacugcaacuacuccaaguacugguaccucaaccacacgaccaccggccgcaccagccugcccaagugcuggcuggucuccaacggcagcuaccucaacgagacgcacuucuccgacgacaucgagcagcaggccgacaacaugaucaccgagaugcugcagaaggaguacauggagcggcaggggaagacgccccugggccucguggaccuguucguguucagcaccuccuucuaccugaucagcaucuuccugcaccucgucaagaucccgugaggacuaguuauaagacugacuagcccgaugggccucccaacgggcccuccuccccuccuugcaccgagauuaaucaaaggcucuuuucagagccaccaaaaaaaaaaaaaaaaaaaaaaaaaaaaaaaaaaaaaaaaaaaaaaaaaaaaaaaaaaaaaaaaaaaaaaaaaaaaaaaaaaaaaaaaaaaaaaaaaaaaa

SEQ ID NO: 43073 - RNA, 1575 nt, Artificial Sequence
  mRNA product Design i-3 (hSL-A100) comprising derived and/or modified sequence from LASV(LM765-SLE-2012;Clade IV)__AIT17814__GPCmut13 (opt1)
aggagaaagcuuaccaugggccagaucgugaccuucuuccaggaggucccccacgugaucgaggaggugaugaacaucguccugaucgcccucagcauccuggccgugcugaaggggcucuacaacuucgcgaccugcggccugguggggcuggucacguuccuccugcugugcggccgcuccugcaccaccagccucuacaaggggguguacgagcugcagacccuggagcucaacauggagacgcugaacaugaccaugccgcuguccugcaccaagaacaacagccaccacuacaucauggugggcaacgagaccggccucgagcugacgcugaccaacaccuccaucaucgaccacaaguucugcaaccucagcgacgcccaccggaagaaccuguacgaccacgcccugauguccaucaucagcaccuuccaccucuccauccccaacuucaaccaguacgaggccaugagcugcgacuucaacgggggcaagaucuccguccaguacaaccugagccacuccuacgccaaggacgcggccgaccacugcgggacgguggccaacggcgugcugcagaccuucaugcgcauggccuggggcgggagcuacaucgcgcucgacuccggccgggggcgcugggacugcaucaugaccagcuaccaguaccugaucauccagaacaccacgugggaggaccacugccaguucucccggcccagccccaucggcuaccuggggcuccugucccagcgcacccgggacaucuacaucagccgccggcugcucggcaccuucaccuggacgcugagcgacuccgagggcaaggacacccccgggggcuacugccugacccgcuggaugcucaucgaggccgagcugaagugcuucgggaacaccgccgucgccaagugcaacgagaagcacgacgaggaguucugcgacaugcugcggcuguucgacuucaacaagcaggccauccagcgccugaaggcggaggcccagaugagcauccagcugaucaacaaggccgugaacgcccucaucaacgaccagcugaucaugaagaaccaccuccgggacaucaugggcauccccuacugcaacuacuccaaguacugguaccucaaccacacgaccaccgggaagaccagccugcccaagugcuggcugguguccaacggcagcuaccucaacgagacgcacuucuccgacgacaucgagcagcaggccgacaacaugaucaccgagaugcugcagaaggaguacauggagcgccagggcaagaccccgcuggggcucgucgaccuguucguguucagcaccuccuucuaccugaucagcaucuuccugcaccucgugaagaucccgugaggacuaguuauaagacugacuagcccgaugggccucccaacgggcccuccuccccuccuugcaccgagauuaaucaaaggcucuuuucagagccaccaaaaaaaaaaaaaaaaaaaaaaaaaaaaaaaaaaaaaaaaaaaaaaaaaaaaaaaaaaaaaaaaaaaaaaaaaaaaaaaaaaaaaaaaaaaaaaaaaaaaa

SEQ ID NO: 43074 - RNA, 1575 nt, Artificial Sequence
  mRNA product Design i-3 (hSL-A100) comprising derived and/or modified sequence from LASV(LM776-SLE-2012;Clade IV)__AIT17824__GPCmut13 (opt1)
aggagaaagcuuaccaugggccagaucgugaccuucuuccaggaggucccccacgugaucgaggaggugaugaacaucguccugaucgcccucagcauccuggccgugcugaaggggcucuacaacuucgcgaccugcggccugguggggcuggucacguuccuccugcugugcggccgcuccugcaccaccagcguguacaaggggguguacgagcuccagacccuggagcugaacauggagacgcucaacaugaccaugccgcuguccugcaccaagaacaacagccaccacuacaucauggucggcaacgagaccggccuggagcucacgcugaccaacaccuccaucaucaaccacaaguucugcaaccugagcgacgcccacaagaagaaccucuacgaccacgcccugauguccaucaucagcaccuuccaccuguccauccccaacuucaaccaguacgaggccaugagcugcgacuucaacgggggcaagaucuccgugcaguacaaccucagccacuccuacgccggggacgcggccaaccacugcggcacgguggccaacgggguccugcagaccuucaugcggauggccuggggcggcagcuacaucgcgcuggacuccgggcacggcaagugggacugcaucaugaccagcuaccaguaccucaucauccagaacaccacgugggaggaccacugccaguucucccgccccagccccaucggguaccugggccugcucucccagcggacccgcgacaucuacaucagccggcgccugcugggcaccuucaccuggacgcucagcgacuccgaggggaaggacaccccgggcggguacugccugacccgguggaugcugaucgaggccgagcucaagugcuucggcaacaccgccguggccaagugcaacgagaagcacgacgaggaguucugcgacaugcugcgccuguucgacuucaacaagcaggccauccagcggcucaaggcggaggcccagaugagcauccagcugaucaacaaggccgugaacgcccugaucaacgaccagcucaucaugaagaaccaccuccgcgacaucauggggauccccuacugcaacuacuccaaguacugguaccugaaccacacgaccaccggcaagaccagccugcccaagugcuggcuggucuccaacggcagcuaccugaacgagacgcacuucuccgacgacaucgagcagcaggccgacaacaugaucaccgagaugcuccagaaggaguacauggagcggcaggggaagacgccccugggccugguggaccucuucguguucagcaccuccuucuaccugaucagcaucuuccugcaccuggucaagaucccgugaggacuaguuauaagacugacuagcccgaugggccucccaacgggcccuccuccccuccuugcaccgagauuaaucaaaggcucuuuucagagccaccaaaaaaaaaaaaaaaaaaaaaaaaaaaaaaaaaaaaaaaaaaaaaaaaaaaaaaaaaaaaaaaaaaaaaaaaaaaaaaaaaaaaaaaaaaaaaaaaaaaaa

SEQ ID NO: 43075 - RNA, 1575 nt, Artificial Sequence
  mRNA product Design i-3 (hSL-A100) comprising derived and/or modified sequence from LASV(Mad39;Clade IV)__ANH09722__GPCmut13 (opt1)
aggagaaagcuuaccaugggccagaucgugaccuucuuccaggaggucccccacgugaucgaggaggugaugaacaucguccugaucgcccucagcauccuggccgugcugaaggggcucuacaacguggcgaccugcggccugaucgggcuggucacguuccuccugcugugcggccgcuccugcaccaccacccucuacaaggggguguacgagcugcaggcccuggagcucaacauggagacgcugaacaugaccaugccgcugagcugcaccaagaacaacucccaccacuacauccgggugggcaacgagaccggccucgagcugacgcugaccaacaccagccucaucaaccacaaguucugcaaccuguccgacgcccacaagaagaaccuguacgaccacgcccucaugagcaucaucuccaccuuccaccugagcauccccaacuucaaccaguacgaggccauguccugcgacuucaacgacgggaagaucagcguccaguacaaccugucccacacguacgcgggcgacaccgccaaccacugcgggaccguggccaacggcgugcuccagaccuucaugcgcauggccuggggcgggagcuacaucgcgcuggacuccggccgcgggggcugggacugcaucaugacgagcuaccaguaccugaucauccagaacaccaccugggaggaccacugccaguucucccggcccagccccaucggguaccucggccugcugucccagcggacccgcgacaucuacaucagccggcgccuccugggcacguucaccuggacccuguccgacagcgaggggaaggacaccccgggcggguacugccucacgcgguggaugcugaucgaggccgagcugaagugcuucggcaacaccgccgucgccaagugcaacgagaagcacgacgaggaguucugcgacaugcuccgccuguucgacuucaacaagcaggccauccagcggcugaaggcggaggcccagaugagcauccagcucaucaacaaggccgugaacgcccugaucaacgaccagcugaucaugaagaaccaccuccgcgacaucauggggauccccuacugcaacuacuccaaguacugguaccugaaccacaccgugaccggcaagacgagccugcccaagugcuggcucgucuccaacggcagcuaccugaacgagacccacuucuccgacgacaucgagcagcaggccgacaacaugaucaccgagaugcugcagaaggaguacauggagcggcaggggaagacgccccucggccugguggaccuguucguguucagcaccuccuucuaccugaucagcaucuuccuccaccuggucaagaucccgugaggacuaguuauaagacugacuagcccgaugggccucccaacgggcccuccuccccuccuugcaccgagauuaaucaaaggcucuuuucagagccaccaaaaaaaaaaaaaaaaaaaaaaaaaaaaaaaaaaaaaaaaaaaaaaaaaaaaaaaaaaaaaaaaaaaaaaaaaaaaaaaaaaaaaaaaaaaaaaaaaaaaa

SEQ ID NO: 43076 - RNA, 1575 nt, Artificial Sequence
  mRNA product Design i-3 (hSL-A100) comprising derived and/or modified sequence from LASV(Z0947-SLE-2011;Clade IV)__AIT17840__GPCmut13 (opt1)
aggagaaagcuuaccaugggccagaucgugaccuucuuccaggaggucccccacgugaucgaggaggugaugaacaucguccugaucgcccucagcauccuggccgugcugaaggggcucuacaacuucgcgaccugcggccugguggggcuggucacguuccuccugcugugcggccgcuccugcaccaucagccucuacaaggggguguacgagcugcagacccuggagcucaacauggagacccugaacaugacgaugccgcuguccugcaccaagaacaacagccaccacuacaucauggugggcaacgagaccggccucgagcugacccugacgaacaccuccaucaucaaccacaaguucugcaaccucagcgacgcccacaagaagaaccuguacgaccacgcccugauguccaucaucagcaccuuccaccucuccauccccaacuucaaccaguacgaggccaugagcugcgacuucaacgggggcaagaucuccguccaguacaaccugagccacuccuacgccggggacgcggccaaccacugcggcaccguggccaacggggugcugcagacguucaugcggauggccuggggcggcagcuacaucgcgcucgacuccgggcgcgaccggugggacugcaucaugaccagcuaccaguaccugaucauccagaacaccaccugggaggaccacugccaguucucccgccccagccccaucggcuaccuggggcuccugucccagcggacgcgcgacaucuacaucagccggcgccugcucggcaccuucaccuggacccugagcgacuccgagggcaaggacacgcccgggggcuacugccugacccgguggaugcucaucgaggccgagcugaagugcuucgggaacaccgccgucgccaagugcaacgagaagcacgacgaggaguucugcgacaugcugcgccucuucgacuucaacaagcaggccauccagcggcugaaggcggaggcccagaugagcauccagcugaucaacaaggccgugaacgcccucaucaacgaccagcugaucaugaagaaccaccuccgcgacaucaugggcauccccuacugcaacuacuccaaguacugguaccugaaccacaccacgaccgggaagaccagccugcccaagugcuggcugguguccaacggcagcuaccucaacgagacccacuucuccgacgacaucgagcagcaggccgacaacaugaucacggagaugcugcagaaggaguacauggagcggcagggcaagaccccgcuggggcucgucgaccuguucguguucagcaccuccuucuaccugaucagcaucuuccugcaccucgugaagaucccgugaggacuaguuauaagacugacuagcccgaugggccucccaacgggcccuccuccccuccuugcaccgagauuaaucaaaggcucuuuucagagccaccaaaaaaaaaaaaaaaaaaaaaaaaaaaaaaaaaaaaaaaaaaaaaaaaaaaaaaaaaaaaaaaaaaaaaaaaaaaaaaaaaaaaaaaaaaaaaaaaaaaaa

SEQ ID NO: 43077 - RNA, 1575 nt, Artificial Sequence
  mRNA product Design i-3 (hSL-A100) comprising derived and/or modified sequence from LASV(Josiah;Clade IV)__NP_694870__GPCmut13 (opt1)
aggagaaagcuuaccaugggccagaucgugaccuucuuccaggaggucccccacgugaucgaggaggugaugaacaucguccugaucgcccucagcgugcuggccgugcugaaggggcucuacaacuucgcgaccugcggccuggucgggcuggugacguuccuccugcugugcggccgcuccugcaccaccagccucuacaaggggguguacgagcugcagacccuggagcucaacauggagacgcugaacaugaccaugccgcuguccugcaccaagaacaacagccaccacuacaucauggucggcaacgagaccggccucgagcugacgcugaccaacaccuccaucaucaaccacaaguucugcaaccucagcgacgcccacaagaagaaccuguacgaccacgcccugauguccaucaucagcaccuuccaccucuccauccccaacuucaaccaguacgaggccaugagcugcgacuucaacgggggcaagaucuccgugcaguacaaccugagccacuccuacgccggggacgcggccaaccacugcggcacgguggccaacgggguccugcagaccuucaugcggauggccuggggcggcagcuacaucgcgcucgacuccgggcgcggcaacugggacugcaucaugaccagcuaccaguaccugaucauccagaacaccacgugggaggaccacugccaguucucccggcccagccccaucggguaccugggccuccugucccagcgcacccgggacaucuacaucagccgccggcugcucggcaccuucaccuggacgcugagcgacuccgaggggaaggacaccccgggcggguacugccugacccgcuggaugcucaucgaggccgagcugaagugcuucggcaacaccgccguggccaagugcaacgagaagcacgacgaggaguucugcgacaugcugcggcuguucgacuucaacaagcaggccauccagcgccugaaggcggaggcccagaugagcauccagcugaucaacaaggccgugaacgcccucaucaacgaccagcugaucaugaagaaccaccuccgggacaucauggggauccccuacugcaacuacuccaaguacugguaccucaaccacacgaccaccggccgcaccagccugcccaagugcuggcuggucuccaacggcagcuaccucaacgagacgcacuucuccgacgacaucgagcagcaggccgacaacaugaucaccgagaugcugcagaaggaguacauggagcggcaggggaagacgccccugggccugguggaccucuucguguucagcaccuccuucuaccugaucagcaucuuccugcaccucgucaagaucccgugaggacuaguuauaagacugacuagcccgaugggccucccaacgggcccuccuccccuccuugcaccgagauuaaucaaaggcucuuuucagagccaccaaaaaaaaaaaaaaaaaaaaaaaaaaaaaaaaaaaaaaaaaaaaaaaaaaaaaaaaaaaaaaaaaaaaaaaaaaaaaaaaaaaaaaaaaaaaaaaaaaaaa

SEQ ID NO: 43078 - RNA, 1572 nt, Artificial Sequence
  mRNA product Design i-3 (hSL-A100) comprising derived and/or modified sequence from LASV(LP;Clade I)__AAF86701__GPCmut13 (opt1)
aggagaaagcuuaccaugggccagaucaucaccuucuuccaggaggugccccacgucaucgaggaggugaugaacaucgugcugaucgcccucagccugcuggccauccucaaggggcuguacaacaucgcgaccugcggcaucaucgggcuggucgccuuccucuuccugugcggcaaguccugcagccugacgcucaagggcggguacgagcugcagacccuggagcucaacauggagacccugaacaugaccaugccgcuguccugcacgaagaacagcucccaccacuacauccgcgugggcaacgagaccgggcucgagcugacccugaccaacacgagcaucaucaaccacaaguucugcaaccucuccgacgcccacaagaagaaccuguacgaccacgcccugaugagcaucaucuccaccuuccaccucagcauccccaacuucaaccaguacgaggccauguccugcgacuucaacggcgggaagaucagcgugcaguacaaccugucccacagcuacgcgggcgacgccgccgagcacugcgggaccgucgccaacggcgugcugcagaccuucaugcggauggcguggggcgggcgcuacaucgcccucgacuccggcaaggggaacugggacugcaucaugacgagcuaccaguaccugaucauccagaacaccaccugggaggaccacugccaguucucccggcccagccccaucggcuaccugggccuccugucccagcgcacccgggacaucuacaucagccgccggcugcucgggacguucaccuggacccugagcgacuccgagggcaacgagacccccgggggcuacugccugacgcgcuggaugcucaucgaggccgagcugaagugcuucgggaacaccgccguggccaagugcaacgagaagcacgacgaggaguucugcgacaugcugcggcuguucgacuucaacaagcaggcgauccgccggcugaaggccgaggcccagaugagcauccagcugaucaacaaggccgucaacgcccucaucaacgaccagcugaucaugaagaaccaccuccgcgacaucaugggcauccccuacugcaacuacuccaaguacugguaccucaaccacaccagcuccggccggaccagccugcccaagugcuggcugaucuccaacgggagcuaccucaacgagacgcaguucuccgacgacaucgagcagcaggcggacaacaugaucaccgagaugcugcagaaggaguacaucgagcgccagggcaagaccccgcuggggcugguggacaucuucaucuucagcaccuccuucuaccucaucagcaucuuccugcaccugaucaagaucccgugaggacuaguuauaagacugacuagcccgaugggccucccaacgggcccuccuccccuccuugcaccgagauuaaucaaaggcucuuuucagagccaccaaaaaaaaaaaaaaaaaaaaaaaaaaaaaaaaaaaaaaaaaaaaaaaaaaaaaaaaaaaaaaaaaaaaaaaaaaaaaaaaaaaaaaaaaaaaaaaaaaaaa

SEQ ID NO: 43079 - RNA, 1572 nt, Artificial Sequence
  mRNA product Design i-3 (hSL-A100) comprising derived and/or modified sequence from LASV(803213;Clade II)__AAF86703__GPCmut13 (opt1)
aggagaaagcuuaccaugggccagaucaucaccuucuuccaggaggugccccacgucaucgaggaggugaugaacaucgugcugaucgcccucagccugcuggccauccucaaggggaucuacaacgucgcgaccugcggccuguucgggcugaucuccuuccuccugcugugcggccgcagcugcuccgugacguacaaggggguguacgagcuccagacccuggagcugaacauggccaaccucaacaugaccaugccgcugagcugcaccaagaacaacucccaccacuacaucauggucggcaacgagacgggccuggagcucacccugaccaacaccagcaucaucaaccacaaguucugcaaccuguccgacgcccacaagaagaaccucuacgaccacgcccugaugagcaucaucuccacguuccaccugagcauccccaacuucaaccaguacgaggccauguccugcgacuucaacgggggcaagaucagcgugcaguacaaccucucccacagcuucgcgguggacgccgccaaccacugcgggaccaucgccaacggcguccugcagaccuucaugcggauggcguggggcggguccuacaucgcccuggacagcggcaaggggaacugggacugcaucaugaccuccuaccaguaccucaucauccagaacacgaccugggaggaccacugccaguucagccgccccucccccaucggcuaccuggggcugcucagccagcggacccgcgacaucuacaucagccggcgccugcugggcaccuucacguggacccucuccgacagcgagggcaacgaggcccccgggggcuacugccugacccgguggaugcugaucgaggccgagcucaagugcuucgggaacaccgccguggcgaagugcaacgagaagcacgacgaggaguucugcgacaugcugcgccuguucgacuucaacaagcaggccaucaagcggcucaagacggaggcccagauguccauccagcugaucaacaaggccgugaacgcccugaucaacgaccagcucaucaugaagaaccaccuccgcgacaucaugggcauccccuacugcaacuacagccgguacugguaccugaaccacaccgucaccgggaagaccucccugccccgcugcuggcuggugagcaacggcuccuaccugaacgagacgcacuucagcgacgacaucgagcagcaggcggacaacaugaucaccgagaugcuccagaaggaguacauggaccggcagggcaagaccccgcuggggcugguggaccuguucgucuucuccaccagcuucuaccucaucuccaucuuccugcaccuggugaagaucccgugaggacuaguuauaagacugacuagcccgaugggccucccaacgggcccuccuccccuccuugcaccgagauuaaucaaaggcucuuuucagagccaccaaaaaaaaaaaaaaaaaaaaaaaaaaaaaaaaaaaaaaaaaaaaaaaaaaaaaaaaaaaaaaaaaaaaaaaaaaaaaaaaaaaaaaaaaaaaaaaaaaaaa

SEQ ID NO: 43080 - RNA, 1572 nt, Artificial Sequence
  mRNA product Design i-3 (hSL-A100) comprising derived and/or modified sequence from LASV(GA391;Clade III)__CAA36645__GPCmut13 (opt1)
aggagaaagcuuaccaugggccagaucgugaccuucuuccaggaggucccccacgugaucgaggaggugaugaacaucguccugaucgcccucagcauccuggccauccugaaggggcucuacaacguggcgaccugcggccugaucgggcuggugacguuccuccugcuguccggccgcagcugcucccucaucuacaaggggaccuacgagcugcagacccuggagcucaacauggagacccugaacaugacgaugccgcugagcugcaccaagaacaacucccaccacuacauccgggucggcaacgagaccggccucgagcugacccugacgaacaccagcauccucaaccacaaguucugcaaccuguccgacgcccacaagcgcaaccuguacgaccacagccucauguccaucaucagcaccuuccaccuguccauccccaacuucaaccaguacgaggccaugagcugcgacuucaacgggggcaagaucaccgugcaguacaaccugucccacagcuucgccguggacgccgcggggcacugcggcacgcucgccaacgggguccugcagaccuucaugcggauggccuggggcggcuccuacaucgcccuggacagcgggcgcggcaacugggacugcaucaugaccuccuaccaguaccucaucauccagaacaccacgugggacgaccacugccaguucagccggcccucccccaucggguaccugggccugcucagccagcgcacccgggacaucuacaucagccgccggcugcugggcaccuucaccuggacgcucuccgacagcgaggggaacgagaccccgggcggguacugccugacccgcuggaugcugaucgaggcggagcucaagugcuucggcaacaccgccguggccaagugcaacgagaagcacgacgaggaguucugcgacaugcugcggcuguucgacuucaacaagcaggccauccgccggcucaagacggaggcccagauguccauccagcugaucaacaaggcggugaacgcccugaucaacgaccagcucaucaugaagaaccaccuccgcgacaucauggggauccccuacugcaacuacagccgguacugguaccugaaccacaccuccaccggcaagaccagccugccccgcugcuggcugaucuccaacggcagcuaccugaacgagacgaaguucuccgacgacaucgagcagcaggccgacaacaugaucaccgagaugcugcagaaggaguacaucgaccggcaggggaagacgccccucggccuggucgaccuguucguguucagcaccuccuucuaccucaucagcaucuuccugcaccuggugaagaucccgugaggacuaguuauaagacugacuagcccgaugggccucccaacgggcccuccuccccuccuugcaccgagauuaaucaaaggcucuuuucagagccaccaaaaaaaaaaaaaaaaaaaaaaaaaaaaaaaaaaaaaaaaaaaaaaaaaaaaaaaaaaaaaaaaaaaaaaaaaaaaaaaaaaaaaaaaaaaaaaaaaaaaa

SEQ ID NO: 43081 - RNA, 1575 nt, Artificial Sequence
  mRNA product Design i-3 (hSL-A100) comprising derived and/or modified sequence from LASV(AV;Clade V)__CCA30314__GPCmut13 (opt1)
aggagaaagcuuaccaugggccagaucgugaccuucuuccaggaggucccccacgugaucgaggaggugaugaacaucguccugaucgcccucagcauccuggccgugcugaaggggcucuacaacaucgcgaccugcggccugaucgggcugaucacguuccuccugcugugcggccgcuccugcagcuccaaccucuacaaggggguguacgagcugcagagccuggaccucaacauggagacccugaacaugaccaugccgcuguccugcaccaagaacaacagccaccacuacauccgggucggcaacgacacgggccucgagcugacccugaccaacaccuccauccucaaccacaaguucugcaaccugagcgacgcccacaagaaggaccuguacgaccacgcccucauguccaucaucagcacguuccaccuguccauccccaacuucaaccaguacgaggccaugagcugcgacuucaacgggggcaagaucuccgugcaguacaaccugagccacuccuacgccaucgacgcggccaaccacugcgggaccguggccaacggcauccuccagaccuucaugcgcauggccuggggcgggagcuacaucgcgcuggacuccggccgggggaacugggacugcaucaugaccagcuaccaguaccugaucauccagaacacgaccugggagaaccacugccaguucucccgccccagccccaucggcuaccucgggcugcugagccagcggacccgcgacaucuacaucucccggcgccuccugggcaccuucacguggacccugagcgacuccgagggcaacgccacccccgggggcuacugccucacccgguggaugcugaucgaggccgagcugaagugcuucgggaacacggccgucgccaagugcaacgagaagcacgacgaggaguucugcgacaugcuccgccuguucgacuucaacaagcaggcgaucagccggcugaaguccgaggcccagaugagcauccagcucaucaacaaggccgugaacgcccugaucaacgaccagcugaucaugaagaaccaccuccgcgacaucaugggcauccccuacugcaacuacuccaaguacugguaccugaaccacaccaucaccgggaagaccagccugcccaagugcuggcucguguccaacggcagcuaccugaacgagacgcacuucuccgacgacaucgagcagcaggccgacaacaugaucaccgagaugcugcagaaggaguacauggagcggcagggcaagaccccgcuggggcucgucgaccuguucguguucagcaccuccuucuaccugaucagcaucuuccuccgccuggugaagaucccgugaggacuaguuauaagacugacuagcccgaugggccucccaacgggcccuccuccccuccuugcaccgagauuaaucaaaggcucuuuucagagccaccaaaaaaaaaaaaaaaaaaaaaaaaaaaaaaaaaaaaaaaaaaaaaaaaaaaaaaaaaaaaaaaaaaaaaaaaaaaaaaaaaaaaaaaaaaaaaaaaaaaaa

SEQ ID NO: 43082 - RNA, 1572 nt, Artificial Sequence
  mRNA product Design i-3 (hSL-A100) comprising derived and/or modified sequence from LASV(Togo/2016/7082;Clade VI)__AMR44577__GPCmut13 (opt1)
aggagaaagcuuaccaugggccagaucaucaccuucuuccaggaggugccccacgucaucgaggaggugaugaacaucgugcugaucgcccucagccugcuggccauccucaagggggucuacaacguggcgaccugcggcaucaucgggcuggugacguuccuguuccucugcggccgcuccugcagccugaucuacaagggguccuacgagcugcagacccucgagcugaacauggagacccugaacaugaccaugccgcucagcugcacgaagaacuccagccaccacuacauccgggucggcaacgagaccggccuggagcugacccucaccaacacguccaucaucaaccacaaguucugcaaccugagcgacgcccacaagcgcaaccuguacgaccacgcccucauguccauccugagcaccuuccaccuguccauccccaacuucaaccaguacgaggccaugagcugcgacuucaacgggggcaagaucuccgugcaguacaaccucagccacgccuacgcgguggacgccgccgagcacugcgggaccgucgccaacggcgugcugcagaccuucaugcggauggcguggggcggguccuacaucgcccuggacagcggccgcgggaacugggacugcaucaugacguccuaccaguaccucaucauccagaacaccaccugggaggaccacugccaguucagccggcccucccccaucggcuaccuggggcugcucagccagcgcacccgggacaucuacaucagccgccggcugcugggcacguucaccuggacccucuccgacagcgagggcaacgagacccccgggggcuacugccugacgcgcuggaugcugaucgaggccgagcucaagugcuucgggaacaccgccguggccaagugcaacgagaagcacgacgaggaguucugcgacaugcugcggcuguucgacuucaacaagcaggcgauccagcgccucaaguccgaggcccagaugagcauccagcugaucaacaaggccgucaacgcccugaucaacgaccagcucaucaugaagaaccaccuccgggacaugaugggcauccccuacugcaacuacuccaaguacugguaccugaaccacaccagcuccgggcgcaccagccugcccaagugcuggcugguguccaacggcagcuaccugaacgagacgcacuucuccgacgacaucgagcagcaggccgacaacaugaucaccgagaugcuccagaaggaguacaucgaccggcagggcaagaccccgcuggggcugguggaccuguucgucuucagcaccuccuucuaccucaucagcaucuuccugcaccugaucaagaucccgugaggacuaguuauaagacugacuagcccgaugggccucccaacgggcccuccuccccuccuugcaccgagauuaaucaaaggcucuuuucagagccaccaaaaaaaaaaaaaaaaaaaaaaaaaaaaaaaaaaaaaaaaaaaaaaaaaaaaaaaaaaaaaaaaaaaaaaaaaaaaaaaaaaaaaaaaaaaaaaaaaaaaa

SEQ ID NO: 43083 - RNA, 1572 nt, Artificial Sequence
  mRNA product Design i-3 (hSL-A100) comprising derived and/or modified sequence from LASV(KAK-428;Clade n.d. (VII))__ANH09740__GPCmut13 (opt1)
aggagaaagcuuaccaugggccagaucgugaccuucuuccaggaggucccccacgugaucgaggaggugaugaacaucguccugaucgcccucagccugcuggccauccucaaggggcuguacaacuucgcgaccugcggcgugaucgggcugaucacguuccuccugcugugcggccgcuccugcagcgccaccuacaaggggcaguacgagcuccagacccuggagcugaacauggagucccucaacaugaccaugccgcugagcugcacgaagaacaacucccaccacuacauccgggccggcaacaacaccggccuggagcucacccugaccaacacgagcaucaucucccacaaguucugcaaccugagcgacgcccacaagaagaaccucuacgaccacacccugauguccaucaucaccaccuuccaccugagcauccccaacuucaaccaguacgaggccauguccugcgacuucaacgggggcaagaucagcauccaguacaaccucucccacagcuacgcgggggacgccgcccagcacugcggcacgguggccaacgggguccugcagaccuucaugcgcauggcguggggcggcuccuaccuggcccucgacagcgggcggcgcggcugggacugcaucaucuccagcuaccaguaccugaucauccagaacaccaccugggacgaccacugccaguucucccggcccagccccaucggguaccugggcuucgugagccagaagacgcgcgacaucuacaucucccggcgccuccugggcaccuucaccuggacccugagcgacuccgaggggcacgacaugccgggcggguacugccucacgcgguggaugcugaucgaggccgaccugaagugcuucggcaacaccgccguggccaagugcaacgagaagcacgacgaggaguucugcgacauguggcgccucuucgacuucaacaagcaggcgauccagcggcugaaggccgaggcccagaugaacauccagcugaucaacaaggccgucaacgcccucaucaacgaccagcugaugaugaagaaccaccuccgcgacaucauggggauccccuacugcaacuacagcaaguucugguaccugaacaacaccaccacgggccggaccucccugccccgcugcuggcugaucagcaacggcuccuaccucaacgagacccacuucagcgacgacaucgagcagcaggcggacaacaugaucaccgagaugcugcagaaggaguacauggaccggcaggggaagacgccccugggccucguggaccuguucguguucuccaccagcuucuaccugaucaccaucuuccugcaccucgucaagaucccgugaggacuaguuauaagacugacuagcccgaugggccucccaacgggcccuccuccccuccuugcaccgagauuaaucaaaggcucuuuucagagccaccaaaaaaaaaaaaaaaaaaaaaaaaaaaaaaaaaaaaaaaaaaaaaaaaaaaaaaaaaaaaaaaaaaaaaaaaaaaaaaaaaaaaaaaaaaaaaaaaaaaaa

SEQ ID NO: 43084 - RNA, 1572 nt, Artificial Sequence; identical to SEQ ID NO: 43078
  mRNA product Design i-3 (hSL-A100) comprising derived and/or modified sequence from LASV(Pinneo-NIG-1969;Clade I)__AIT17836__GPCmut13 (opt1)

SEQ ID NO: 43085 - RNA, 1572 nt, Artificial Sequence
  mRNA product Design i-3 (hSL-A100) comprising derived and/or modified sequence from LASV(ISTH0009-NIG-2011;Clade II)__AIT17404__GPCmut13 (opt1)
aggagaaagcuuaccaugggccagaucaucaccuucuuccaggaggugccccacgucaucgaggaggugaugaacaucgugcugaucgcccucagccugcuggccauccucaaggggaucuacaacgucgcgaccugcggccuguucgggcugguguccuuccuccugcugugcggccgcagcugcuccacgaccuacaaggggguguacgagcuccagacccuggagcuggacauggccagccucaacaugaccaugccgcuguccugcacgaagaacaacagccaccacuacaucauggucggcaacgagaccggccuggagcucacccugaccaacacguccaucaucaaccacaaguucugcaaccugagcgacgcccacaagaagaaccucuacgaccacgcccugauguccaucaucagcaccuuccaccuguccauccccaacuucaaccaguacgaggccaugagcugcgacuucaacgggggcaagaucuccgugcaguacaaccucagccacgcguacgccguggacgccgccaaccacugcgggaccaucgcgaacggcguccugcagaccuucaugcggauggccuggggcggguccuacaucgcccuggacagcggcaagggguccugggacugcaucaugacgagcuaccaguaccucaucauccagaacaccaccugggaggaccacugccaguucucccgccccagccccaucggcuaccuggggcugcucagccagcggacccgcgacaucuacaucucccggcgccugcugggcacguucaccuggacccucagcgacuccgagggcaacgagacccccgggggcuacugccugacgcgguggaugcugaucgaggccgagcucaagugcuucgggaacaccgccguggcgaagugcaacgagaagcacgacgaggaguucugcgacaugcugcgccuguucgacuucaacaagcaggccauccggcgccucaagaccgaggcccagaugagcauccagcugaucaacaaggccgugaacgcccugaucaacgaccagcucaucaugaagaaccaccuccgggacaucaugggcaucccguacugcaacuacuccaaguacugguaccugaaccacaccgucacggggaagaccagccugccccgcugcuggcugguguccaacggcagcuaccugaacgagacccacuucuccgacgacaucgagcagcaggcggacaacaugaucaccgagcuccugcagaaggaguacauggaccggcagggcaagacgccccuggggcugguggaccucuucgucuucagcaccuccuucuaccugaucagcaucuuccugcaccucaucaagaucccgugaggacuaguuauaagacugacuagcccgaugggccucccaacgggcccuccuccccuccuugcaccgagauuaaucaaaggcucuuuucagagccaccaaaaaaaaaaaaaaaaaaaaaaaaaaaaaaaaaaaaaaaaaaaaaaaaaaaaaaaaaaaaaaaaaaaaaaaaaaaaaaaaaaaaaaaaaaaaaaaaaaaaa

SEQ ID NO: 43086 - RNA, 1572 nt, Artificial Sequence
  mRNA product Design i-3 (hSL-A100) comprising derived and/or modified sequence from LASV(ISTH2010-NIG-2012;Clade II)__AIT17482__GPCmut13 (opt1)
aggagaaagcuuaccaugggccagaucaucaccuucuuccaggaggugccccacgucaucgaggaggugaugaacaucgugcugaucgcccucagccugcuggccauccucaaggggaucuacaacgucgcgaccugcggccuguucgggcugguguccuuccuccugcugugcggccgcagcugcuccacgaccuacaaggggguguacgagcuccagacccuggagcuggacauggccagccucaacaugaccaugccgcuguccugcacgaagaacaacagccaccacuacaucauggucggcaacgagaccggccuggagcucacccugaccaacacguccaucaucaaccacaaguucugcaaccugagcgacgcccacaagaagaaccucuacgaccacgcccugauguccaucaucagcaccuuccaccuguccauccccaacuucaaccaguacgaggccaugagcugcgacuucaacgggggcaagaucuccgugcaguacaaccucagccacgcguacgccguggacgccgccaaccacugcgggaccaucgcgaacggcguccugcagaccuucaugcggauggccuggggcggguccuacaucgcccuggacagcggcaagggguccugggacugcaucaugacgagcuaccaguaccucaucauccagaacaucaccugggaggaccacugccaguucucccgccccagccccaucggcuaccuggggcugcucagccagcggacccgcgacaucuacaucucccggcgccugcugggcaccuucacguggacccucagcgacuccgagggcaacgagacccccgggggcuacugccugacccgguggaugcugaucgaggccgagcucaagugcuucgggaacacggccguggcgaagugcaacgagaagcacgacgaggaguucugcgacaugcugcgccuguucgacuucaacaagcaggccauccggcgccucaagaccgaggcccagaugagcauccagcugaucaacaaggccgugaacgcccugaucaacgaccagcucaucaugaagaaccaccuccgggacaucaugggcauccccuacugcaacuacuccaaguacugguaccugaaccacaccgucaccgggaagacgagccugccccgcugcuggcugguguccaacggcagcuaccugaacgagacccacuucuccgacgacaucgagcagcaggcggacaacaugaucaccgagcuccugcagaaggaguacaucgaccggcagggcaagaccccgcuggggcugguggaccucuucgucuucagcacguccuucuaccugaucagcaucuuccugcaccucgugaagaucccgugaggacuaguuauaagacugacuagcccgaugggccucccaacgggcccuccuccccuccuugcaccgagauuaaucaaaggcucuuuucagagccaccaaaaaaaaaaaaaaaaaaaaaaaaaaaaaaaaaaaaaaaaaaaaaaaaaaaaaaaaaaaaaaaaaaaaaaaaaaaaaaaaaaaaaaaaaaaaaaaaaaaaa

SEQ ID NO: 43087 - RNA, 1572 nt, Artificial Sequence
  mRNA product Design i-3 (hSL-A100) comprising derived and/or modified sequence from LASV(Lassa virus/H.sapiens-wt/NGA/2015/ISTH_0543;Clade II)__AVO03639__GPCmut13 (opt1)
aggagaaagcuuaccaugggccagaucaucaccuucuuccaggaggugccccacgucaucgaggaggugaugaacaucgugcugaucgcccucagccugcuggccauccucaaggggaucuacaacgucgcgaccugcggccuguucgggcugguguccuuccuccugcugugcggccgcagcugcuccacgaccuacaaggggguguacgagcuccagacccuggagcuggacauggccaaccucaacaugaccaugccgcugagcugcacgaagaacaacucccaccacuacaucauggucggcaacgagaccggccuggagcucacccugaccaacacgagcaucaucaaccacaaguucugcaaccuguccgacgcccacaagaagaaccucuacgaccacgcccugaugagcaucaucuccaccuuccaccugagcauccccaacuucaaccaguacgaggccauguccugcgacuucaacgggggcaagaucagcgugcaguacaaccucucccacaccuacgcgguggacgccgccaaccacugcgggaccaucgccaacggcguccugcagacguucaugcggauggcguggggcgggagcuacaucgcccuggacuccggcaaggggagcugggacugcaucaugaccuccuaccaguaccucgugauccagaacaccaccugggaggaccacugccaguucagccgccccucccccaucggcuaccuggggcugcucagccagcggacgcgcgacaucuacaucagccggcgccugcugggcaccuucaccuggacccucuccgacagcgagggcaacgagacgcccgggggcuacugccugacccgguggaugcugaucgaggccgagcucaagugcuucgggaacaccgccguggccaagugcaacgagaagcacgacgaggaguucugcgacaugcugcgccuguucgacuucaacaagcaggcgauccggcgccucaagaccgaggcccagauguccauccagcugaucaacaaggccgucaacgcccugaucaacgaccagcucaucaugaagaaccaccuccgggacaucaugggcauccccuacugcaacuacagcaaguacugguaccugaaccacacggugaccgggaagaccucccugccccgcugcuggcuggugagcaacggcuccuaccugaacgagacccacuucagcgacgacaucgagcagcaggccgacaacaugaucacggagcuccugcagaaggaguacaucgaccggcagggcaagaccccgcuggggcuggucgaccucuucguguucuccaccagcuucuaccugaucuccaucuuccugcaccucgugaagaucccgugaggacuaguuauaagacugacuagcccgaugggccucccaacgggcccuccuccccuccuugcaccgagauuaaucaaaggcucuuuucagagccaccaaaaaaaaaaaaaaaaaaaaaaaaaaaaaaaaaaaaaaaaaaaaaaaaaaaaaaaaaaaaaaaaaaaaaaaaaaaaaaaaaaaaaaaaaaaaaaaaaaaaa

SEQ ID NO: 43088 - RNA, 1572 nt, Artificial Sequence
  mRNA product Design i-3 (hSL-A100) comprising derived and/or modified sequence from LASV(Lassa virus/H.sapiens-wt/NGA/2016/ISTH_0009;Clade II)__AVO03571__GPCmut13 (opt1)
aggagaaagcuuaccaugggccagaucaucaccuucuuccaggaggugccccacgucaucgaggaggugaugaacaucgugcugaucgcccucagccugcuggccauccucaaggggaucuacaacgucgcgaccugcggccugcuggggcucguguccuuccugcugcucugcggccgcagcugcuccacgaccuacaaggggguguacgagcugcagacccuggagcucgacauggccagccugaacaugaccaugccgcuguccugcacgaagaacaacagccaccacuacaucauggucggcaacgagaccggccucgagcugacccugaccaacacguccaucaucaaccacaaguucugcaaccucagcgacgcccacaagaagaaccuguacgaccacgcccugauguccaucaucagcaccuuccaccucuccauccccaacuucaaccaguacgaggccaugagcugcgacuucaacgggggccggaucuccgugcaguacaaccugagccacuccuacgcgguggacgccgccaaccacugcgggaccaucgccaacggcguccugcagaccuucaugcgcauggcguggggcgggagcuacaucgcccucgacuccggcaaggggagcugggacugcaucaugacguccuaccaguaccugaucauccagaacaccaccugggaggaccacugccaguucagccggcccagccccaucggcuaccuggggcuccugucccagcgcacccgggacaucuacaucagccgccggcugcucggcacguucaccuggacccuguccgacagcgagggcaacgagacccccgggggcuacugccugacgcgcuggaugcucaucgaggccgagcugaagugcuucgggaacaccgccguggccaagugcaacgagaagcacgacgaggaguucugcgacaugcugcggcuguucgacuucaacaagcaggcgauccgccggcugaagaccgaggcccagauguccauccagcugaucaacaaggccgugaacgcccucaucaacgaccagcugaucaugaagaaccaccuccgcgacaucaugggcaucccguacugcaacuacagcaaguacugguaccucaaccacaccgucacggggaagaccucccugccccggugcuggcuggugagcaacggcuccuaccucaacgagacccacuucagcgacgacaucgagcagcaggccgacaacaugaucaccgagcugcugcagaaggaguacaucgaccgccagggcaagacgccccuggggcucguggaccuguucgucuucuccaccagcuucuaccugaucuccaucuuccuccaccuggugaagaucccgugaggacuaguuauaagacugacuagcccgaugggccucccaacgggcccuccuccccuccuugcaccgagauuaaucaaaggcucuuuucagagccaccaaaaaaaaaaaaaaaaaaaaaaaaaaaaaaaaaaaaaaaaaaaaaaaaaaaaaaaaaaaaaaaaaaaaaaaaaaaaaaaaaaaaaaaaaaaaaaaaaaaaa

SEQ ID NO: 43089 - RNA, 1572 nt, Artificial Sequence
  mRNA product Design i-3 (hSL-A100) comprising derived and/or modified sequence from LASV(Lassa virus/H.sapiens-wt/NGA/2016/ISTH_0017;Clade II)__AVO03567__GPCmut13 (opt1)
aggagaaagcuuaccaugggccagaucaucaccuucuuccaggaggugccccacgucaucgaggaggugaugaacaucgugcugaucgcccucagccugcuggccauccucaaggggaucuacaacgucgcgaccugcggccuguucgggcugguguccuuccuccugcugugcggccgcagcugcuccacgaccuacaaggggguguacgagcuccagacccuggagcuggacauggccagccucaacaugaccaugccgcuguccugcacgaagaacaacagccaccacuacaucauggucggcaacgagaccggccuggagcucacccugaccaacacguccaucaucaaccacaaguucugcaaccugagcgacgcccacaagaagaaccucuacgaccacgcccugauguccaucaucagcaccuuccaccuguccauccccaacuucaaccaguacgaggccaugagcugcgacuucaacgggggcaagaucuccgugcaguacaaccucagccacaccuacgcgaucgacgccgccaaccacugcgggaccaucgccaacggcgugcugcagacguucaugcggauggcguggggcggguccuacaucgcccuggacagcggcaagggguccugggacugcaucaugaccagcuaccaguaccucaucauccagaacaccaccugggaggaccacugccaguucucccgccccagccccaucggcuaccuggggcugcucagccagcggacgcgcgacaucuacaucucccggcgccugcugggcaccuucaccuggacccucagcgacuccgagggcaacgagacgcccgggggcuacugccugacccgguggaugcugaucgaggccgagcucaagugcuucgggaacaccgccgucgccaagugcaacgagaagcacgacgaggaguucugcgacaugcugcgccuguucgacuucaacaagcaggcgauccggcgccucaagaccgaggcccagaugagcauccagcugaucaacaaggccgugaacgcccugaucaacgaccagcucaucaugaagaaccaccuccgggacaucaugggcauccccuacugcaacuacuccaaguacugguaccugaaccacacggugaccgggaagaccagccugccccgcugcuggcuggucuccaacggcagcuaccugaacgagacccacuucuccgacgacaucgagcagcaggccgacaacaugaucacggagcuccugcagaaggaguacauggaccggcagggcaagaccccgcuggggcugguggaccucuucguguucagcaccuccuucuaccugaucagcaucuuccugcaccucguccgcaucccgugaggacuaguuauaagacugacuagcccgaugggccucccaacgggcccuccuccccuccuugcaccgagauuaaucaaaggcucuuuucagagccaccaaaaaaaaaaaaaaaaaaaaaaaaaaaaaaaaaaaaaaaaaaaaaaaaaaaaaaaaaaaaaaaaaaaaaaaaaaaaaaaaaaaaaaaaaaaaaaaaaaaaa

SEQ ID NO: 43090 - RNA, 1572 nt, Artificial Sequence
  mRNA product Design i-3 (hSL-A100) comprising derived and/or modified sequence from LASV(Lassa virus/H.sapiens-wt/NGA/2018/ISTH_0959;Clade II)__AVV65099__GPCmut13 (opt1)
aggagaaagcuuaccaugggccagaucaucaccuucuuccaggaggugccccacgucaucgaggaggugaugaacaucgugcugaucgcccucagccugcuggccauccucaaggggaucuacaacgucgugaccugcggccuguucgggcugguguccuuccuccugcugugcggccgcagcugcuccacgaccuacaagggggucuacgagcuccagacccuggagcuggacauggcgagccucaacaugaccaugccgcuguccugcacgaagaacaacagccaccacuacaucauggugggcaacgagaccggccuggagcucacccugaccaacacguccaucaucaaccacaaguucugcaaccugagcgacgcccacaagaagaaccucuacgaccacgcccugauguccaucaucagcaccuuccaccuguccauccccaacuucaaccaguacgaggccaugagcugcgacuucaacgggggcaagaucuccgugcaguacaaccucagccacgccuacgcgaucgacgccgccaaccacugcgggaccaucgccaacggcguccugcagaccuucaugcggauggcguggggcggguccuacaucgcccuggacagcggcaagggguccugggacugcaucaugacgagcuaccaguaccucaucauccagaacaccaccugggaggaccacugccaguucucccgccccagccccaucggcuaccuggggcugcucagccagcggacccgcgacaucuacaucucccggcgccugcugggcacguucaccuggacccucagcgacuccgagggcaacgagacccccgggggcuacugccugacgcgguggaugcugaucgaggccgagcucaagugcuucgggaacaccgccguggccaagugcaacgagaagcacgacgaggaguucugcgacaugcugcgccuguucgacuucaacaagcaggcgauccggcgccucaagaccgaggcccagaugagcauccagcugaucaacaaggccgugaacgcccugaucaacgaccagcucaucaugaagaaccaccuccgggacaucaugggcaucccguacugcaacuacuccaaguacugguaccugaaccacaccgucacggggaagaccagccugccccgcugcuggcugguguccaacggcagcuaccugaacgagacccacuucuccgacgacaucgagcagcaggccgacaacaugaucaccgagcuccugcagaaggaguacaucgaccggcagggcaagacgccccuggggcugguggaccucuucgucuucagcaccuccuucuaccugaucagcaucuuccugcaccucgugaagaucccgugaggacuaguuauaagacugacuagcccgaugggccucccaacgggcccuccuccccuccuugcaccgagauuaaucaaaggcucuuuucagagccaccaaaaaaaaaaaaaaaaaaaaaaaaaaaaaaaaaaaaaaaaaaaaaaaaaaaaaaaaaaaaaaaaaaaaaaaaaaaaaaaaaaaaaaaaaaaaaaaaaaaaa

SEQ ID NO: 43091 - RNA, 1572 nt, Artificial Sequence
  mRNA product Design i-3 (hSL-A100) comprising derived and/or modified sequence from LASV(LASV003-NIG-2008;Clade II)__AIT17580__GPCmut13 (opt1)
aggagaaagcuuaccaugggccagaucaucaccuucuuccaggaggugccccacgucaucgaggaggugaugaacaucgugcugaucgcccucagccugcuggccauccucaaggggaucuacaacgucgcgaccugcggccuguucgggcugguguccuuccuccugcugugcggccgcagcugcuccacgaccuacaaggggguguacgagcuccagacccuggagcuggacauggccagccucaacaugaccaugccgcuguccugcacgaagaacaacagccaccacuacaucauggucggcaacgagaccggccuggagcucacccugaccaacacguccaucaucaaccacaaguucugcaaccugagcgacgcccacaagaagaaccucuacgaccacgcccugauguccaucaucagcaccuuccaccuguccauccccaacuucaaccaguacgaggccaugagcugcgacuucaacgggggcaagaucuccgugcaguacaaccucagccacaccuacgcgguggacgccgccaaccacugcgggaccaucgccaacggcguccugcagacguucaugcggauggcguggggcggguccuacaucgcccuggacagcggcaagggguccugggacugcaucaugaccagcuaccaguaccucaucauccagaacaccaccugggaggaccacugccaguucucccgccccagccccaucggcuaccuggggcugcucagccagcggacgcgcgacaucuacaucucccggcgccugcugggcaccuucaccuggacccucagcgacuccgagagcaacgagacgccgggcggguacugccugacccgguggaugcugaucgaggccgagcucaagugcuucggcaacaccgccguggccaagugcaacgagaagcacgacgaggaguucugcgacaugcugcgccuguucgacuucaacaagcaggcgauccggcgccucaaggccgaggcccagauguccauccagcugaucaacaaggccgugaacgcccugaucaacgaccagcucaucaugaagaaccaccuccgggacaucauggggauccccuacugcaacuacagcaaguacugguaccugaaccacaccgucacgggccgcaccucccugccccggugcuggcuggugagcaacggguccuaccugaacgagacccacuucagcgacgacaucgagcagcaggcggacaacaugaucaccgagcuccugcagaaggaguacauggaccgccagggcaagacgccccugggccugguggaccucuucgucuucuccaccagcuucuaccugaucuccaucuuccugcaccucgugaagaucccgugaggacuaguuauaagacugacuagcccgaugggccucccaacgggcccuccuccccuccuugcaccgagauuaaucaaaggcucuuuucagagccaccaaaaaaaaaaaaaaaaaaaaaaaaaaaaaaaaaaaaaaaaaaaaaaaaaaaaaaaaaaaaaaaaaaaaaaaaaaaaaaaaaaaaaaaaaaaaaaaaaaaaa

SEQ ID NO: 43092 - RNA, 1572 nt, Artificial Sequence
  mRNA product Design i-3 (hSL-A100) comprising derived and/or modified sequence from LASV(LASV035-NIG-2009;Clade II)__AIT17588__GPCmut13 (opt1)
aggagaaagcuuaccaugggccagaucaucaccuucuuccaggaggugccccacgucaucgaggaggugaugaacaucgugcugaucgcccucagccugcuggccauccucaaggggaucuacaacgucgcgaccugcggccuguucgggcugguguccuuccuccugcugugcggccgcagcugcuccacgaccuacaaggggguguacgagcuccagacccuggagcuggacauggccagccucaacaugaccaugccgcuguccugcacgaagaacaacagccaccacuacaucauggucggcaacgagaccggccuggagcucacccugaccaacacguccaucaucaaccacaaguucugcaaccugagcgacgcccacaagaagaaccucuacgaccacgcccugauguccaucaucagcaccuuccaccuguccauccccaacuucaaccaguacgaggccaugagcugcgacuucaacgggggcaagaucuccgugcaguacaaccucagccacgcguacgccguggacgccgccaaccacugcgggaccaucgcgaacggcguccugcagaccuucaugcggauggccuggggcggguccuacaucgcccuggacagcggcaagggguccugggacugcaucaugacgagcuaccaguaccucaucauccagaacaccaccugggaggaccacugccaguucucccgccccagccccaucggcuaccuggggcugcucagccagcggacccgcgacaucuacaucucccggcgccugcugggcacguucaccuggacccucagcgacuccgagggcaacgagacccccgggggcuacugccugacgcgguggaugcugaucgaggccgagcucaagugcuucgggaacaccgccguggcgaagugcaacgagaagcacgacgaggaguucugcgacaugcugcgccuguucgacuucaacaagcaggccauccggcgccucaaggccgaggcccagaugagcauccagcugaucaacaaggccgugaacgcgcugaucaacgaccagcucaucaugaagaaccaccuccgggacaucaugggcauccccuacugcaacuacuccaaguacugguaccugaaccacaccgucaccgggaagacgagccugccccgcugcuggcugguguccaacggcagcuaccugaacgagacccacuucuccgacgacaucgagcagcaggccgacaacaugaucaccgagcuccugcagaaggaguacaucgaccggcagggcaagaccccgcuggggcugguggaccucuucgucuucagcacguccuucuaccugaucagcaucuuccugcaccucgugaagaucccgugaggacuaguuauaagacugacuagcccgaugggccucccaacgggcccuccuccccuccuugcaccgagauuaaucaaaggcucuuuucagagccaccaaaaaaaaaaaaaaaaaaaaaaaaaaaaaaaaaaaaaaaaaaaaaaaaaaaaaaaaaaaaaaaaaaaaaaaaaaaaaaaaaaaaaaaaaaaaaaaaaaaaa

SEQ ID NO: 43093 - RNA, 1572 nt, Artificial Sequence
  mRNA product Design i-3 (hSL-A100) comprising derived and/or modified sequence from LASV(LASV1000-NIG-2009;Clade II)__AIT17782__GPCmut13 (opt1)
aggagaaagcuuaccaugggccagaucaucaccuucuuccaggaggugccccacgucaucgaggaggugaugaacaucgugcugaucgcccucagccugcuggccauccucaaggggaucuacaacgucgcgaccugcggccuguucgggcugguguccuuccuccugcugugcggccgcagcugcuccacgaccuacaaggggguguacgagcuccagacccuggagcuggacauggccagccucaacaugaccaugccgcuguccugcacgaagaacaacagccaccacuacaucauggucggcaacgagaccggccuggagcucacccugaccaacacguccaucaucaaccacaaguucugcaaccugagcgacgcccacaagaagaaccucuacgaccacgcccugauguccaucaucagcaccuuccaccuguccauccccaacuucaaccaguacgaggccaugagcugcgacuucaacgggggcaagaucuccgugcaguacaaccucagccacaccuacgcgguggacgccgccaaccacugcgggaccaucgccaacggcguccugcagacguucaugcggauggcguggggcggguccuacaucgcccuggacagcggcaagggguccugggacugcaucaugaccagcuaccaguaccucaucauccagaacaccaccugggaggaccacugccaguucucccgccccagccccaucggcuaccuggggcugcucagccagcggacgcgcgacaucuacaucucccggcgccugcugggcaccuucaccuggacccucagcgacuccgagggcaacgagacgcccgggggcuacugccugacccgguggaugcugaucgaggccgagcucaagugcuucgggaacaccgccguggccaagugcaacgagaagcacgacgaggaguucugcgacaugcugcgccuguucgacuucaacaagcaggcgaucaagcggcucaagaccgaggcccagaugagcauccagcugaucaacaaggccgugaacgcccugaucaacgaccagcucaucaugaagaaccaccuccgcgacaucaugggcauccccuacugcaacuacuccaaguacugguaccugaaccacacggucaccgggaagaccagccugccccggugcuggcugguguccaacggcagcuaccugaacgagacccacuucuccgacgacaucgagcagcaggccgacaacaugaucacggagcuccugcagaaggaguacaucgaccgccagggcaagaccccgcuggggcugguggaccucuucgucuucagcaccuccuucuaccugaucagcaucuuccugcaccucgugaagaucccgugaggacuaguuauaagacugacuagcccgaugggccucccaacgggcccuccuccccuccuugcaccgagauuaaucaaaggcucuuuucagagccaccaaaaaaaaaaaaaaaaaaaaaaaaaaaaaaaaaaaaaaaaaaaaaaaaaaaaaaaaaaaaaaaaaaaaaaaaaaaaaaaaaaaaaaaaaaaaaaaaaaaaa

SEQ ID NO: 43094 - RNA, 1572 nt, Artificial Sequence
  mRNA product Design i-3 (hSL-A100) comprising derived and/or modified sequence from LASV(LASV221-NIG-2010;Clade II)__AIT17624__GPCmut13 (opt1)
aggagaaagcuuaccaugggccagaucaucaccuucuuccaggaggugccccacgucaucgaggaggugaugaacaucgugcugaucgcccucagccugcuggccauccucaaggggaucuacaacgucgcgaccugcggccuguucgggcugguguccuuccuccugcugugcggccgcagcugcuccacgaccuacaaggggguguacgagcuccagacccuggagcuggacauggccagccucaacaugaccaugccgcuguccugcacgaagaacaacagccaccacuacaucauggucggcaacgagaccggccuggagcucacccugaccaacacguccaucaucaaccacaaguucugcaaccugagcgacgcccacaagaagaaccucuacgaccacgcccugauguccaucaucagcaccuuccaccuguccauccccaacuucaaccaguacgaggccaugagcugcgacuucaacgggggcaagaucuccgugcaguacaaccucagccacaccuacgcgaucgacgccgccaaccacugcgggaccaucgccaacggcgugcugcagacguucaugcggauggcguggggcggguccuacaucgcccuggacagcggcaagggguccugggacugcaucaugaccagcuaccaguaccucaucauccagaacaccaccugggaggaccacugccaguucucccgccccagccccaucggcuaccuggggcugcucagccagcggacgcgcgacaucuacaucucccggcgccugcugggcaccuucaccuggacccucagcgacuccgagggcaacgagacgcccgggggcuacugccugacccgguggaugcugaucgaggccgagcucaagugcuucgggaacaccgccgucgccaagugcaacgagaagcacgacgaggaguucugcgacaugcugcgccuguucgacuucaacaagcaggcgauccggcgccucaagaccgaggcccagaugagcauccagcugaucaacaaggccgugaacgcccugaucaacgaccagcucaucaugaagaaccaccuccgggacaucaugggcauccccuacugcaacuacuccaaguacugguaccugaaccacacggugaccgggaagaccagccugccccgcugcuggcuggucuccaacggcagcuaccugaacgagacccacuucuccgacgacaucgagcagcaggccgacaacaugaucacggagaugcuccagaaggaguacauggaccggcagggcaagaccccgcuggggcugguggaccuguucguguucagcaccuccuucuaccucaucagcaucuuccugcaccuggucaagaucccgugaggacuaguuauaagacugacuagcccgaugggccucccaacgggcccuccuccccuccuugcaccgagauuaaucaaaggcucuuuucagagccaccaaaaaaaaaaaaaaaaaaaaaaaaaaaaaaaaaaaaaaaaaaaaaaaaaaaaaaaaaaaaaaaaaaaaaaaaaaaaaaaaaaaaaaaaaaaaaaaaaaaaa

SEQ ID NO: 43095 - RNA, 1572 nt, Artificial Sequence
  mRNA product Design i-3 (hSL-A100) comprising derived and/or modified sequence from LASV(LASV237-NIG-2010;Clade II)__AIT17638__GPCmut13 (opt1)
aggagaaagcuuaccaugggccagaucaucaccuucuuccaggaggugccccacgucaucgaggaggugaugaacaucgugcugaucgcccucagccugcuggccauccucaaggggaucuacaacgucgcgaccugcggccuguucgggcugguguccuuccuccugcugugcggccgcagcugcuccacgaccuacaaggggguguacgagcuccagacccuggagcuggacauggccagccucaacaugaccaugccgcuguccugcacgaagaacaacagccaccacuacaucauggucggcaacgagaccggccuggagcucacccugaccaacacguccaucaucaaccacaaguucugcaaccugagcgacgcccacaagaaggaccucuacgaccacgcccugauguccaucaucagcaccuuccaccuguccauccccaacuucaaccaguacgaggccaugagcugcgacuucaacgggggcaagaucuccgugcaguacaaccucagccacaccuacgcgguggacgccgccaaccacugcgggaccaucgccaacggcguccugcagacguucaugcggauggcguggggcggguccuacaucgcccuggacagcggcaagggguccugggacugcaucaugaccagcuaccaguaccucaucauccagaacaccaccugggaggaccacugccaguucucccgccccagccccaucggcuaccuggggcugcucagccagcggacgcgcgacaucuacaucucccggcgccugcugggcaccuucaccuggacccucagcgacuccgagggcaacgagacgcccgggggcuacugccugacccgguggaugcugaucgaggccgagcucaagugcuucgggaacaccgccguggccaagugcaacgagaagcacgacgaggaguucugcgacaugcugcgccuguucgacuucaacaagcaggcgauccggcgccucaagaccgaggcccagaugagcauccagcugaucaacaaggccgugaacgcccugaucaacgaccagcucaucaugaagaaccaccuccgggacaucaugggcauccccuacugcaacuacuccaaguacugguaccugaaccacacggucaccgggaagaccagccugccccgcugcuggcugguguccaacggcagcuaccugaacgagacccacuucuccgacgacaucgagcagcaggccgacaacaugaucacggagcuccugcagaaggaguacauggaccggcagggcaagaccccgcuggggcugguggaccucuucgucuucagcaccuccuucuaccugaucagcaucuuccugcaccucaucaagaucccgugaggacuaguuauaagacugacuagcccgaugggccucccaacgggcccuccuccccuccuugcaccgagauuaaucaaaggcucuuuucagagccaccaaaaaaaaaaaaaaaaaaaaaaaaaaaaaaaaaaaaaaaaaaaaaaaaaaaaaaaaaaaaaaaaaaaaaaaaaaaaaaaaaaaaaaaaaaaaaaaaaaaaa

SEQ ID NO: 43096 - RNA, 1572 nt, Artificial Sequence
  mRNA product Design i-3 (hSL-A100) comprising derived and/or modified sequence from LASV(LASV253-NIG-2011;Clade II)__AIT17670__GPCmut13 (opt1)
aggagaaagcuuaccaugggccagaucaucaccuucuuccaggaggugccccacgucaucgaggaggugaugaacaucgugcugaucgcccucagccugcuggccauccucaaggggaucuacaacgucgcgaccugcggccuguucgggcugguguccuuccuccugcugugcggccgcagcugcuccacgaccuacaaggggguguacgagcuccagacccuggagcuggacauggccagccucaacaugaccaugccgcuguccugcacgaagaacaacagccaccacuacaucauggucggcaacgagaccggccuggagcucacccugaccaacacguccaucaucaaccacaaguucugcaaccugagcgacgcccacaagaagaaccucuacgaccacgcccugauguccaucaucagcaccuuccaccuguccauccccaacuucaaccaguacgaggccaugagcugcgacuucaacgggggcaagaucuccgugcaguacaaccucagccacaccuacgcgguggacgccgccaaccacugcgggaccaucgccaacggcguccugcagacguucaugcggauggcguggggcggguccuacaucgcccuggacagcggcaagggguccugggacugcaucaugaccagcuaccaguaccucaucauccagaacaccaccugggaggaccacugccaguucucccgccccagccccaucggcuaccuggggcugcucagccagcggacgcgcgacaucuacaucucccggcgccugcugggcaccuucaccuggacccucagcgacuccgagggcaacgagacgcccgggggcuacugccugacccgguggaugcugaucgaggccgagcucaagugcuucgggaacaccgccguggccaagugcaacgagaagcacgacgaggaguucugcgacaugcugcgccuguucgacuucaacaagcaggcgauccggcgccucaaggccgaggcccagaugagcauccagcugaucaacaaggccgugaacgcccugaucaacgaccagcucaucaugaagaaccaccuccgggacaucaugggcaucccguacugcaacuacuccaaguacugguaccugaaccacaccgucacggggcgcaccagccugccccggugcuggcugguguccaacggcagcuaccugaacgagacccacuucuccgacgacaucgagcagcaggcggacaacaugaucaccgagcuccugcagaaggaguacaucgaccgccagggcaagacgccccuggggcugguggaccucuucgucuucagcaccuccuucuaccugaucagcaucuuccugcaccucgugaagaucccgugaggacuaguuauaagacugacuagcccgaugggccucccaacgggcccuccuccccuccuugcaccgagauuaaucaaaggcucuuuucagagccaccaaaaaaaaaaaaaaaaaaaaaaaaaaaaaaaaaaaaaaaaaaaaaaaaaaaaaaaaaaaaaaaaaaaaaaaaaaaaaaaaaaaaaaaaaaaaaaaaaaaaa

SEQ ID NO: 43097 - RNA, 1572 nt, Artificial Sequence
  mRNA product Design i-3 (hSL-A100) comprising derived and/or modified sequence from LASV(LASV254-NIG-2011;Clade II)__AIT17674__GPCmut13 (opt1)
aggagaaagcuuaccaugggccagaucaucaccuucuuccaggaggugccccacgucaucgaggaggugaugaacaucgugcugaucgcccucagccugcuggccauccucaaggggaucuacaacgucgcgaccugcggccuguucgggcugguguccuuccuccugcugugcggccgcagcugcuccacgaccuacaaggggguguacgagcuccagacccuggagcuggacaugaccaaccucaacaugacgaugccgcugagcugcaccaagaacaacucccaccacuacaucauggucggcaacgagaccggccuggagcucacccugacgaacaccagcaucaucaaccacaaguucugcaaccuguccgacgcccacaagaagaaccucuacaaccacgcccugaugagcaucaucuccaccuuccaccugagcauccccaacuucaaccaguacgaggccauguccugcgacuucaacgggggcaagaucagcgugcaguacaaccucucccacagcuacgccguggacgcggccaaccacugcgggaccaucgccaacggcguccugcagacguucaugcggauggccuggggcggguccuacaucgcgcuggacagcggcaaggggaacugggacugcaucaugaccuccuaccaguaccucaucauccagaacaccaccugggaggaccacugccaguucagccgccccucccccaucggcuaccuggggcugcucagccagcggacgcgcgacaucuacaucagccggcgccugcugggcaccuucaccuggacccucuccgacagcgagggcaacgagacgcccgggggcuacugccugacccgguggaugcugaucgaggccgagcucaagugcuucgggaacaccgccguggccaagugcaacgagaagcacgacgaggaguucugcgacaugcugcgccuguucgacuucaacaagcaggccauccggcgccucaagaccgaggcgcaggccaacauccagcugaucaacaaggccgugaacgcccugaucaacgaccagcucaucaugaagaaccaccuccgggacaucaugggcauccccuacugcaacuacuccaaguacugguaccugaaccacacggucaccgggaagaccagccugccccgcugcuggcugguguccaacggcagcuaccugaacgagacccacuucuccgacgacaucgagcagcaggccgacaacaugaucacggagcuccugcagaaggaguacauggaccggcagggcaagaccccgcuggggcugguggaccucuucgucuucagcaccuccuucuaccugaucagcaucuuccugcaccucgugaagaucccgugaggacuaguuauaagacugacuagcccgaugggccucccaacgggcccuccuccccuccuugcaccgagauuaaucaaaggcucuuuucagagccaccaaaaaaaaaaaaaaaaaaaaaaaaaaaaaaaaaaaaaaaaaaaaaaaaaaaaaaaaaaaaaaaaaaaaaaaaaaaaaaaaaaaaaaaaaaaaaaaaaaaaa

SEQ ID NO: 43098 - RNA, 1572 nt, Artificial Sequence
  mRNA product Design i-3 (hSL-A100) comprising derived and/or modified sequence from LASV(Nig08-A19;Clade III)__ADU56618__GPCmut13 (opt1)
aggagaaagcuuaccaugggccagaucgugaccuucuuccaggaggucccccacgugaucgaggaggugaugaacaucguccugaucgcccucagcauccuggccauccugaaggggcucuacaacaucgcgaccugcggccugaucgggcuggugacguuccuccugcuguccggccgcagcugcuccaugaccuacaaggggguguacgagcuccagacccuggagcugaacaugaacacccucaacaugacgaugccgcugagcugcaccaagaacaacucccaccacuacaucauggucggcaacgagaccggccuggagcucacccugacgaacaccagccugcuccaccacaaguucugcaaccuguccgacgcccacaagaagaaccuguacgaccacacccucaugagcaucaucuccaccuuccaccugagcauccccaacuucaaccaguacgaggccauguccugcgacuucaacgggggcaagaucacggugcaguacaaccugagccacuccuacgccaucgacgccgcgaaccacugcgggaccguggccaacggcguccuccagaccuucaugcggauggccuggggcgggagcuacaucgcccuggacuccggccgcgggaagugggacugcaucaugaccagcuaccaguaccugaucauccagaacacgaccugggaggaccacugccaguucucccggcccagccccaucggcuaccucgggcugcugucccagcgcacccgggacaucuacaucagccgccggcuccugggcaccuucacguggacccugagcgacuccgagggcaacgagacccccgggggcuacugccucacccgcuggaugcugaucgaggcggagcugaagugcuucgggaacacggccguggccaagugcaacgagaagcacgacgaggaguucugcgacaugcuccggcuguucgacuucaacaagcaggccauccgccggcugaaggccgaggcgcagaugagcauccagcucaucaacaaggccgugaacgcccugaucaacgaccagcugaucaugaagaaccaccuccgcgacaucaugggcauccccuacugcaacuacuccaaguacugguaccugaaccacaccagcaccgggcggaccucccugccccgcugcuggcucgucagcaacggcuccuaccugaacgagacgcacuucagcgacgacaucgagcagcaggccgacaacaugaucaccgagaugcugcagaaggaguaccuggaccggcagggcaagaccccgcucgggcugguggaccuguucguguucuccaccagcuucuaccucaucuccaucuuccugcaccuggucaagaucccgugaggacuaguuauaagacugacuagcccgaugggccucccaacgggcccuccuccccuccuugcaccgagauuaaucaaaggcucuuuucagagccaccaaaaaaaaaaaaaaaaaaaaaaaaaaaaaaaaaaaaaaaaaaaaaaaaaaaaaaaaaaaaaaaaaaaaaaaaaaaaaaaaaaaaaaaaaaaaaaaaaaaaa

SEQ ID NO: 43099 - RNA, 1575 nt, Artificial Sequence
  mRNA product Design i-3 (hSL-A100) comprising derived and/or modified sequence from LASV(G1180-SLE-2010;Clade IV)__AIT17168__GPCmut13 (opt1)
aggagaaagcuuaccaugggccagaucgugaccuucuuccaggaggucccccacgugaucgaggaggugaugaacaucguccugaucgcccucagcauccuggccgugcugaaggggcucuacaacuucgcgaccugcggccugguggggcugcucaccuuccugcugcucugcggccgcuccugcaccgccagccgguacaagggggucuacgagcugcagacccuggagcucaacauggagacccugaacaugacgaugccgcuguccugcaccaagaacaacagccaccacuacaucauggugggcaacgagaccggccucgagcugacccugacgaacaccuccaucaucaaccacaaguucugcaaccucagcgacgcccacaagaagaaccuguacgaccacgcccugauguccaucaucagcaccuuccaccucuccauccccaacuucaaccaguacgaggccaugagcugcgacuucaacgggggcaagaucuccgugcaguacaaccugagccacuccuacgcgggggacgccgccaaccacugcggcaccgucgccaacggggugcugcagacguucaugcgcauggcguggggcggcagcuacaucgcccucgacuccgggcacggcagcugggacugcaucaugaccuccuaccaguaccugaucauccagaacaccaccugggaggaccacugccaguucagccggcccucccccaucggguaccugggccuccugagccagcgcacgcgggacaucuacaucagccgccggcugcucggcaccuucaccuggacccuguccgacagcgaggggaaggacacgccgggcggguacugccugacccgcuggaugcucaucgaggccgagcugaagugcuucggcaacaccgccguggccaagugcaacgagaagcacgacgaggaguucugcgacaugcugcggcuguucgacuucaacaagcaggcgauccagcgccugaaggccgaggcccagauguccauccagcugaucaacaaggccgucaacgcccucaucaacgaccagcugaucaugaagaaccaccuccgggacaucauggggauccccuacugcaacuacagcaaguacugguaccucaaccacaccacgaccggcaagaccucccugcccaagugcuggcuggugagcaacggcuccuaccucaacgagacccacuucagcgacgacaucgagcagcaggcggacaacaugaucacggagaugcugcagaaggaguacauggagcgccaggggaagacgccccugggccugguggaccucuucgucuucuccaccagcuucuaccugaucuccaucuuccugcaccucgugaagaucccgugaggacuaguuauaagacugacuagcccgaugggccucccaacgggcccuccuccccuccuugcaccgagauuaaucaaaggcucuuuucagagccaccaaaaaaaaaaaaaaaaaaaaaaaaaaaaaaaaaaaaaaaaaaaaaaaaaaaaaaaaaaaaaaaaaaaaaaaaaaaaaaaaaaaaaaaaaaaaaaaaaaaaa

SEQ ID NO: 43100 - RNA, 1575 nt, Artificial Sequence
  mRNA product Design i-3 (hSL-A100) comprising derived and/or modified sequence from LASV(G1442-SLE-2011;Clade IV)__AIT17180__GPCmut13 (opt1)
aggagaaagcuuaccaugggccagaucgugaccuucuuccaggaggucccccacgugaucgaggaggugaugaacaucguccugaucgcccucagcauccuggccgugcugaaggggcucuacaacguggcgaccugcggccugaucgggcuggucacguuccuccugcugugcggccgcuccugcaccaccacccucuacaaggggguguacgagcugcagacgcuggagcucaacauggagacccugaacaugaccaugccgcugagcugcaccaagaacaacucccaccacuacauccgggugggcaacgagacgggccucgagcugacccugaccaacaccagcaucaucaaccacaaguucugcaaccucuccgacgcccacaagaagaaccuguacgaccacgcccugaugagcaucaucuccacguuccaccucagcauccccaacuucaaccaguacgaggccauguccugcgacuucaacgggggcaagaucagcguccaguacaaccugucccacagcuacgccggggacgcggccaaccacugcggcaccguggccaacggggugcugcagaccuucaugcgcauggccuggggcggcuccuacaucgcgcucgacagcgggcggggcaacugggacugcaucaugaccuccuaccaguaccugaucauccagaacacgaccugggacgaccacugccaguucagccgccccucccccaucggguaccugggccuccugagccagcggacccgcgacgucuacaucucccggcgccugcucggcaccuucacguggacccugagcgacagcgaggggaaggacaccccgggcggguacugccugacccgguggaugcucaucgaggccgagcugaagugcuucggcaacacggccguggccaagugcaacgagaagcacgacgaggaguucugcgacaugcugcgccucuucgacuucaacaagcaggccauccagcggcugaaggcggaggcccagauguccauccagcugaucaacaaggccgugaacgcccucaucaacgaccagcugaucaugaagaaccaccuccgcgacaucauggggauccccuacugcaacuacagcaaguacugguaccugaacaacaccgccaccggcaagaccucccugcccaagugcuggcugaucagcaacggcuccuaccucaacgagacgcacuucagcgacgacaucgagcaggaggcggacaacaugaucaccgagaugcugcagaaggaguacauggagcggcaggggaagacgccccugggccuggucgaccucuucguguucuccaccagcuucuaccugaucuccaucuuccugcaccucgugaagaucccgugaggacuaguuauaagacugacuagcccgaugggccucccaacgggcccuccuccccuccuugcaccgagauuaaucaaaggcucuuuucagagccaccaaaaaaaaaaaaaaaaaaaaaaaaaaaaaaaaaaaaaaaaaaaaaaaaaaaaaaaaaaaaaaaaaaaaaaaaaaaaaaaaaaaaaaaaaaaaaaaaaaaaa

SEQ ID NO: 43101 - RNA, 1575 nt, Artificial Sequence
  mRNA product Design i-3 (hSL-A100) comprising derived and/or modified sequence from LASV(G3010-SLE-2013;Clade IV)__AIT17344__GPCmut13 (opt1)
aggagaaagcuuaccaugggccagaucgugaccuucuuccaggaggucccccacgugaucgaggaggugaugaacaucguccugaucgcccucagcauccuggccgugcugaaggggcucuacaacuucgcgaccugcggccugguggggcuggucacguuccuccugcugugcggccgcuccugcaccaccagccucuacaaggggguguacgagcugcagacccuggagcucaacauggagacgcugaacaugaccaugccgcuguccugcaccaagaacaacagccaccacuacaucauggugggcaacgagaccggccucgagcugacgcugaccaacaccuccaucaucaaccacaaguucugcaaccucagcgacgcccacaagaagaaccuguacaaccacgcccugauguccaucaucagcaccuuccaccucuccauccccaacuucaaccaguacgaggccaugagcugcgacuucaacgggggcaagaucuccguccaguacaaccugagccacuccuacgccggggacgcggccagccacugcggcacgguggccaacggggugcugcagaccuucaugcggauggccuggggcggcuccuacaucgcgcucgacagcggguacggcaagugggacugcaucaugaccuccuaccaguaccugaucauccagaacaccacgugggaggaccacugccaguucagccgccccucccccaucggguaccugggccuccugagccagcggacccgcgacaucuacaucagccggcgccugcucggcaccuucaccuggacgcuguccgacagcgaggggaaggacaccccgggcggguacugccugacccgguggaugcucaucgaggccgagcugaagugcuucggcaacaccgccgucgccaagugcaacgagaagcacgacgaggaguucugcgacaugcugcgccucuucgacuucaacaagcaggccauccagcggcugaagacggaggcgcagauguccauccagcugaucaacaaggccgugaacgcccucaucaacgaccagcugaucaugaagaaccaccuccgcgacaucauggggauccccuacugcaacuacagcaaguacugguaccugaaccacaccaccaccggcaagacgucccugcccaagugcuggcuggugagcaacggcuccuaccucaacgagacccacuucagcgacgacaucgagcagcaggccgacaacaugaucaccgagaugcugcagaaggaguacauggagcggcaggggaagacgccccugggccuggucgaccucuucguguucuccaccagcuucuaccugaucuccaucuuccugcaccucgugaagaucccgugaggacuaguuauaagacugacuagcccgaugggccucccaacgggcccuccuccccuccuugcaccgagauuaaucaaaggcucuuuucagagccaccaaaaaaaaaaaaaaaaaaaaaaaaaaaaaaaaaaaaaaaaaaaaaaaaaaaaaaaaaaaaaaaaaaaaaaaaaaaaaaaaaaaaaaaaaaaaaaaaaaaaa

SEQ ID NO: 43102 - RNA, 1575 nt, Artificial Sequence
  mRNA product Design i-3 (hSL-A100) comprising derived and/or modified sequence from LASV(G502-SLE-2009;Clade IV)__AIT17126__GPCmut13 (opt1)
aggagaaagcuuaccaugggccagaucgugaccuucuuccaggaggucccccacgugaucgaggaggugaugaacaucguccugaucgcccucagcauccuggccgugcugaaggggcucuacaacuucgcgaccugcggccugguggggcugcucacguuccugcugcucugcggccgcuccugcaccaccgggcuguacaagggcgucuacgagcugcagacccucgagcugaacauggagacgcugaacaugaccaugccgcucagcugcaccaagaacaacucccaccacuacaucauggugggcaacgagaccgggcuggagcugacgcucaccaacaccagcaucaucaaccacaaguucugcaaccuguccgacgcccacaagaagaaccuguacgaccacgcccucaugagcaucaucuccaccuuccaccugagcauccccaacuucaaccaguacgaggccauguccugcgacuucaacggcgggaagaucagcgugcaguacaaccugucccacagcuacgccggcgacgcggccgaccacugcgggacggucgccaacggcgugcuccagaccuucaugcggauggccuggggcggguccuacaucgcgcuggacagcggccgcgggcggugggacugcaucaugaccuccuaccaguaccugaucauccagaacaccacgugggaggaccacugccaguucagccgccccucccccaucggcuaccucggccugcugagccagcggacccgcgacaucuacaucucccggcgccuccuggggaccuucaccuggacgcugagcgacagcgagggcaaggacacccccgggggcuacugccucacccgguggaugcugaucgaggccgagcugaagugcuucgggaacaccgccguggccaagugcaacgagaagcacgacgaggaguucugcgacaugcuccgccuguucgacuucaacaagcaggccauccagcggcugaaggcggaggcccagauguccauccagcucaucaacaaggccgucaacgcccugaucaacgaccagcuggugaugaagaaccaccuccgcgacaucaugggcauccccuacugcaacuacagccgguacugguaccugaaccacacgaccaccggccgcaccucccugcccaagugcuggcucgugagcaacggguccuaccugaacgagacgcacuucagcgacgacaucgagcagcaggccgacaacaugaucaccgagaugcugcagaaggaguacauggagcggcagggcaagaccccgcuggggcucgucgaccuguucguguucuccaccagcuucuaccugaucuccaucuuccuccaccuggugaagaucccgugaggacuaguuauaagacugacuagcccgaugggccucccaacgggcccuccuccccuccuugcaccgagauuaaucaaaggcucuuuucagagccaccaaaaaaaaaaaaaaaaaaaaaaaaaaaaaaaaaaaaaaaaaaaaaaaaaaaaaaaaaaaaaaaaaaaaaaaaaaaaaaaaaaaaaaaaaaaaaaaaaaaaa

SEQ ID NO: 43103 - RNA, 1575 nt, Artificial Sequence
  mRNA product Design i-3 (hSL-A100) comprising derived and/or modified sequence from LASV(G733-SLE-2010;Clade IV)__AIT17154__GPCmut13 (opt1)
aggagaaagcuuaccaugggccagaucgugaccuucuuccaggaggucccccacgugaucgaggaggugaugaacaucguccugaucgcccucagcauccuggccgugcugaaggggcucuacaacuucgcgaccugcggcaucguggggcuggucuccuuccugcuccugugcggccgcagcugcacgaccucccuguacaaggggguguacgagcuccagacccuggagcugaacauggagacccucaacaugacgaugccgcugagcugcaccaagaacaacucccaccacuacaucauggugggcaacgagaccggccuggagcucacccugacgaacaccagcaucaucaaccacaaguucugcaaccuguccgacgcccacaagaagaaccucuacgaccacgcccugaugagcaucaucuccaccuuccaccugagcauccccaacuucaaccaguacgaggccauguccugcgacuucaacgggggcaagaucagcguccaguacaaccucucccacagcuacgccggggacgcggccaaccacugcggcaccaucgccaacggggugcugcagacguucaugcggauggccuggggcggcuccuacaucgcgcuggacagcgggcgcgaccggugggacugcaucaugaccuccuaccaguaccucaucauccagaacaccaccugggaggaccacugccaguucagccgccccucccccaucggcuaccuggggcugcucagccagcggacgcgcgacaucuacaucagccggcgccugcugggcaccuucaccuggacccucuccgacagcgagggcaaggacacgcccgggggcuacugccugacccgguggaugcugaucgaggccgagcucaagugcuucgggaacaccgccguggccaagugcaacgagaagcacgacgaggaguucugcgacaugcugcgccuguucgacuucaacaagcaggccauccagcggcucaaggcggaggcccagauguccauccagcugaucaacaaggccgucaacgcccugaucaacgaccagcucaucaugaagaaccaccuccgcgacaucaugggcauccccuacugcaacuacagcaaguacugguaccugaaccacaccacgaccgggaagaccucccugcccaagugcuggcuggugagcaacggcuccuaccugaacgagacccacuucagcgacgacaucgagcagcaggccgacaacaugaucacggagaugcuccagaaggaguacauggagcggcagggcaagaccccgcuggggcugguggaccuguucgucuucuccaccagcuucuaccucaucuccaucuuccugcaccuggugaagaucccgugaggacuaguuauaagacugacuagcccgaugggccucccaacgggcccuccuccccuccuugcaccgagauuaaucaaaggcucuuuucagagccaccaaaaaaaaaaaaaaaaaaaaaaaaaaaaaaaaaaaaaaaaaaaaaaaaaaaaaaaaaaaaaaaaaaaaaaaaaaaaaaaaaaaaaaaaaaaaaaaaaaaaa

SEQ ID NO: 43104 - RNA, 1575 nt, Artificial Sequence
  mRNA product Design i-3 (hSL-A100) comprising derived and/or modified sequence from MOPV/LASV reassortant(IGS-1;Clade IV)__AFY05576__GPCmut13 (opt1)
aggagaaagcuuaccaugggccagaucgugaccuucuuccaggaggucccccacgugaucgaggaggugaugaacaucguccugaucgcccucagcgugcuggccgugcugaaggggcucuacaacuucgcgaccugcggccuggucgggcuggugacguuccuccugcugugcggccgcuccugcaccaccagccucuacaaggggguguacgagcugcagacccuggagcucaacauggagacgcugaacaugaccaugccgcuguccugcaccaagaacaacagccaccacuacaucauggucggcaacgagaccggccucgagcugacgcugaccaacaccuccaucaucaaccacaaguucugcaaccucagcgacgcccacaagaagaaccuguacgaccacgcccugauguccaucaucagcaccuuccaccucuccauccccaacuucaaccaguacgaggccaugagcugcgacuucaacgggggcaagaucuccgugcaguacaaccugagccacuccuacgccggggacgcggccaaccacugcggcacgguggccaacgggguccugcagaccuucaugcggauggccuggggcggcagcuacaucgcgcucgacuccgggcgcggcaacugggacugcaucaugaccagcuaccaguaccugaucauccagaacaccacgugggaggaccacugccaguucucccggcccagccccaucggguaccugggccuccugucccagcgcacccgggacaucuacaucagccgccggcugcucggcaccuucaccuggacgcugagcgacuccgagggggaggacaccccgggcggguacugccugacccgcuggaugcucaucgaggccgagcugaagugcuucggcaacaccgccguggccaagugcaacgagaagcacgacgaggaguucugcgacaugcugcggcuguucgacuucaacaagcaggccauccagcgccugaaggcggaggcccagaugagcauccagcugaucaacaaggccgugaacgcccucaucaacgaccagcugaucaugaagaaccaccuccgggacaucauggggauccccuacugcaacuacuccaaguacugguaccucaaccacacgaccaccggccgcaccagccugcccaagugcuggcuggucuccaacggcagcuaccucaacgagacgcacuucuccgacgacaucgagcagcaggccgacaacaugaucaccgagaugcugcagaaggaguacauggagcggcaggggaagacgccccugggccugguggaccucuucguguucagcaccuccuucuaccugaucagcaucuuccugcaccucgucaagaucccgugaggacuaguuauaagacugacuagcccgaugggccucccaacgggcccuccuccccuccuugcaccgagauuaaucaaaggcucuuuucagagccaccaaaaaaaaaaaaaaaaaaaaaaaaaaaaaaaaaaaaaaaaaaaaaaaaaaaaaaaaaaaaaaaaaaaaaaaaaaaaaaaaaaaaaaaaaaaaaaaaaaaaa

SEQ ID NO: 43105 - RNA, 1575 nt, Artificial Sequence
  mRNA product Design i-3 (hSL-A100) comprising derived and/or modified sequence from LASV(LM765-SLE-2012;Clade IV)__AIT17814__GPCmut13 (opt1)
aggagaaagcuuaccaugggccagaucgugaccuucuuccaggaggucccccacgugaucgaggaggugaugaacaucguccugaucgcccucagcauccuggccgugcugaaggggcucuacaacuucgcgaccugcggccugguggggcuggucacguuccuccugcugugcggccgcuccugcaccaccagccucuacaaggggguguacgagcugcagacccuggagcucaacauggagacgcugaacaugaccaugccgcuguccugcaccaagaacaacagccaccacuacaucauggugggcaacgagaccggccucgagcugacgcugaccaacaccuccaucaucgaccacaaguucugcaaccucagcgacgcccaccggaagaaccuguacgaccacgcccugauguccaucaucagcaccuuccaccucuccauccccaacuucaaccaguacgaggccaugagcugcgacuucaacgggggcaagaucuccguccaguacaaccugagccacuccuacgccaaggacgcggccgaccacugcgggacgguggccaacggcgugcugcagaccuucaugcgcauggccuggggcgggagcuacaucgcgcucgacuccggccgggggcgcugggacugcaucaugaccagcuaccaguaccugaucauccagaacaccacgugggaggaccacugccaguucucccggcccagccccaucggcuaccuggggcuccugucccagcgcacccgggacaucuacaucagccgccggcugcucggcaccuucaccuggacgcugagcgacuccgagggcaaggacacccccgggggcuacugccugacccgcuggaugcucaucgaggccgagcugaagugcuucgggaacaccgccgucgccaagugcaacgagaagcacgacgaggaguucugcgacaugcugcggcuguucgacuucaacaagcaggccauccagcgccugaaggcggaggcccagaugagcauccagcugaucaacaaggccgugaacgcccucaucaacgaccagcugaucaugaagaaccaccuccgggacaucaugggcauccccuacugcaacuacuccaaguacugguaccucaaccacacgaccaccgggaagaccagccugcccaagugcuggcugguguccaacggcagcuaccucaacgagacgcacuucuccgacgacaucgagcagcaggccgacaacaugaucaccgagaugcugcagaaggaguacauggagcgccagggcaagaccccgcuggggcuggucgaccucuucguguucagcaccuccuucuaccugaucagcaucuuccugcaccucgugaagaucccgugaggacuaguuauaagacugacuagcccgaugggccucccaacgggcccuccuccccuccuugcaccgagauuaaucaaaggcucuuuucagagccaccaaaaaaaaaaaaaaaaaaaaaaaaaaaaaaaaaaaaaaaaaaaaaaaaaaaaaaaaaaaaaaaaaaaaaaaaaaaaaaaaaaaaaaaaaaaaaaaaaaaaa

SEQ ID NO: 43106 - RNA, 1575 nt, Artificial Sequence
  mRNA product Design i-3 (hSL-A100) comprising derived and/or modified sequence from LASV(LM776-SLE-2012;Clade IV)__AIT17824__GPCmut13 (opt1)
aggagaaagcuuaccaugggccagaucgugaccuucuuccaggaggucccccacgugaucgaggaggugaugaacaucguccugaucgcccucagcauccuggccgugcugaaggggcucuacaacuucgcgaccugcggccugguggggcuggucacguuccuccugcugugcggccgcuccugcaccaccagcguguacaaggggguguacgagcuccagacccuggagcugaacauggagacgcucaacaugaccaugccgcuguccugcaccaagaacaacagccaccacuacaucauggucggcaacgagaccggccuggagcucacgcugaccaacaccuccaucaucaaccacaaguucugcaaccugagcgacgcccacaagaagaaccucuacgaccacgcccugauguccaucaucagcaccuuccaccuguccauccccaacuucaaccaguacgaggccaugagcugcgacuucaacgggggcaagaucuccgugcaguacaaccucagccacuccuacgccggggacgcggccaaccacugcggcacgguggccaacgggguccugcagaccuucaugcggauggccuggggcggcagcuacaucgcgcuggacuccgggcacggcaagugggacugcaucaugaccagcuaccaguaccucaucauccagaacaccacgugggaggaccacugccaguucucccgccccagccccaucggguaccugggccugcucucccagcggacccgcgacaucuacaucagccggcgccugcugggcaccuucaccuggacgcucagcgacuccgaggggaaggacaccccgggcggguacugccugacccgguggaugcugaucgaggccgagcucaagugcuucggcaacaccgccguggccaagugcaacgagaagcacgacgaggaguucugcgacaugcugcgccuguucgacuucaacaagcaggccauccagcggcucaaggcggaggcccagaugagcauccagcugaucaacaaggccgugaacgcccugaucaacgaccagcucaucaugaagaaccaccuccgcgacaucauggggauccccuacugcaacuacuccaaguacugguaccugaaccacacgaccaccggcaagaccagccugcccaagugcuggcuggucuccaacggcagcuaccugaacgagacgcacuucuccgacgacaucgagcagcaggccgacaacaugaucaccgagaugcuccagaaggaguacauggagcggcaggggaagacgccccugggccugguggaccuguucguguucagcaccuccuucuaccucaucagcaucuuccugcaccuggucaagaucccgugaggacuaguuauaagacugacuagcccgaugggccucccaacgggcccuccuccccuccuugcaccgagauuaaucaaaggcucuuuucagagccaccaaaaaaaaaaaaaaaaaaaaaaaaaaaaaaaaaaaaaaaaaaaaaaaaaaaaaaaaaaaaaaaaaaaaaaaaaaaaaaaaaaaaaaaaaaaaaaaaaaaaa

SEQ ID NO: 43107 - RNA, 1575 nt, Artificial Sequence
  mRNA product Design i-3 (hSL-A100) comprising derived and/or modified sequence from LASV(Mad39;Clade IV)__ANH09722__GPCmut13 (opt1)
aggagaaagcuuaccaugggccagaucgugaccuucuuccaggaggucccccacgugaucgaggaggugaugaacaucguccugaucgcccucagcauccuggccgugcugaaggggcucuacaacguggcgaccugcggccugaucgggcuggucacguuccuccugcugugcggccgcuccugcaccaccacccucuacaaggggguguacgagcugcaggcccuggagcucaacauggagacgcugaacaugaccaugccgcugagcugcaccaagaacaacucccaccacuacauccgggugggcaacgagaccggccucgagcugacgcugaccaacaccagccucaucaaccacaaguucugcaaccuguccgacgcccacaagaagaaccuguacgaccacgcccucaugagcaucaucuccaccuuccaccugagcauccccaacuucaaccaguacgaggccauguccugcgacuucaacgacgggaagaucagcguccaguacaaccugucccacacguacgcgggcgacaccgccaaccacugcgggaccguggccaacggcgugcuccagaccuucaugcgcauggccuggggcgggagcuacaucgcgcuggacuccggccgcgggggcugggacugcaucaugacgagcuaccaguaccugaucauccagaacaccaccugggaggaccacugccaguucucccggcccagccccaucggguaccucggccugcugucccagcggacccgcgacaucuacaucagccggcgccuccugggcacguucaccuggacccuguccgacagcgaggggaaggacaccccgggcggguacugccucacgcgguggaugcugaucgaggccgagcugaagugcuucggcaacaccgccgucgccaagugcaacgagaagcacgacgaggaguucugcgacaugcuccgccuguucgacuucaacaagcaggccauccagcggcugaaggcggaggcccagaugagcauccagcucaucaacaaggccgugaacgcccugaucaacgaccagcugaucaugaagaaccaccuccgcgacaucauggggauccccuacugcaacuacuccaaguacugguaccugaaccacaccgugaccggcaagacgagccugcccaagugcuggcucgucuccaacggcagcuaccugaacgagacccacuucuccgacgacaucgagcagcaggccgacaacaugaucaccgagaugcugcagaaggaguacauggagcggcaggggaagacgccccugggccucguggaccuguucguguucagcaccuccuucuaccugaucagcaucuuccuccaccuggucaagaucccgugaggacuaguuauaagacugacuagcccgaugggccucccaacgggcccuccuccccuccuugcaccgagauuaaucaaaggcucuuuucagagccaccaaaaaaaaaaaaaaaaaaaaaaaaaaaaaaaaaaaaaaaaaaaaaaaaaaaaaaaaaaaaaaaaaaaaaaaaaaaaaaaaaaaaaaaaaaaaaaaaaaaaa

SEQ ID NO: 43108 - RNA, 1575 nt, Artificial Sequence
  mRNA product Design i-3 (hSL-A100) comprising derived and/or modified sequence from LASV(Z0947-SLE-2011;Clade IV)__AIT17840__GPCmut13 (opt1)
aggagaaagcuuaccaugggccagaucgugaccuucuuccaggaggucccccacgugaucgaggaggugaugaacaucguccugaucgcccucagcauccuggccgugcugaaggggcucuacaacuucgcgaccugcggccugguggggcuggucacguuccuccugcugugcggccgcuccugcaccaucagccucuacaaggggguguacgagcugcagacccuggagcucaacauggagacccugaacaugacgaugccgcuguccugcaccaagaacaacagccaccacuacaucauggugggcaacgagaccggccucgagcugacccugacgaacaccuccaucaucaaccacaaguucugcaaccucagcgacgcccacaagaagaaccuguacgaccacgcccugauguccaucaucagcaccuuccaccucuccauccccaacuucaaccaguacgaggccaugagcugcgacuucaacgggggcaagaucuccguccaguacaaccugagccacuccuacgccggggacgcggccaaccacugcggcaccguggccaacggggugcugcagacguucaugcggauggccuggggcggcagcuacaucgcgcucgacuccgggcgcgaccggugggacugcaucaugaccagcuaccaguaccugaucauccagaacaccaccugggaggaccacugccaguucucccgccccagccccaucggcuaccuggggcuccugucccagcggacgcgcgacaucuacaucagccggcgccugcucggcaccuucaccuggacccugagcgacuccgagggcaaggacacgcccgggggcuacugccugacccgguggaugcucaucgaggccgagcugaagugcuucgggaacaccgccgucgccaagugcaacgagaagcacgacgaggaguucugcgacaugcugcgccucuucgacuucaacaagcaggccauccagcggcugaaggcggaggcccagaugagcauccagcugaucaacaaggccgugaacgcccucaucaacgaccagcugaucaugaagaaccaccuccgcgacaucaugggcauccccuacugcaacuacuccaaguacugguaccugaaccacaccacgaccgggaagaccagccugcccaagugcuggcugguguccaacggcagcuaccucaacgagacccacuucuccgacgacaucgagcagcaggccgacaacaugaucacggagaugcugcagaaggaguacauggagcggcagggcaagaccccgcuggggcuggucgaccucuucguguucagcaccuccuucuaccugaucagcaucuuccugcaccucgugaagaucccgugaggacuaguuauaagacugacuagcccgaugggccucccaacgggcccuccuccccuccuugcaccgagauuaaucaaaggcucuuuucagagccaccaaaaaaaaaaaaaaaaaaaaaaaaaaaaaaaaaaaaaaaaaaaaaaaaaaaaaaaaaaaaaaaaaaaaaaaaaaaaaaaaaaaaaaaaaaaaaaaaaaaaa

SEQ ID NO: 43109 - RNA, 1575 nt, Artificial Sequence
  mRNA product Design i-3 (hSL-A100) comprising derived and/or modified sequence from LASV(Josiah;Clade IV)__NP_694870__GPCmut13 (opt4)
aggagaaagcuuaccaugggccagaucgugaccuucuuccaggaggugccccacgugaucgaggaggugaugaacaucgugcugaucgcccugagcgugcuggccgugcugaagggccuguacaacuucgccaccugcggccuggugggccuggugaccuuccugcugcugugcggcagaagcugcaccaccagccuguacaagggcguguacgagcugcagacccuggagcugaacauggagacccugaacaugaccaugccccugagcugcaccaagaacaacagccaccacuacaucauggugggcaacgagaccggccuggagcugacccugaccaacaccagcaucaucaaccacaaguucugcaaccugagcgacgcccacaagaagaaccuguacgaccacgcccugaugagcaucaucagcaccuuccaccugagcauccccaacuucaaccaguacgaggccaugagcugcgacuucaacggcggcaagaucagcgugcaguacaaccugagccacagcuacgccggcgacgccgccaaccacugcggcaccguggccaacggcgugcugcagaccuucaugagaauggccuggggcggcagcuacaucgcccuggacagcggcagaggcaacugggacugcaucaugaccagcuaccaguaccugaucauccagaacaccaccugggaggaccacugccaguucagcagacccagccccaucggcuaccugggccugcugagccagagaaccagagacaucuacaucagcagaagacugcugggcaccuucaccuggacccugagcgacagcgagggcaaggacacccccggcggcuacugccugaccagauggaugcugaucgaggccgagcugaagugcuucggcaacaccgccguggccaagugcaacgagaagcacgacgaggaguucugcgacaugcugagacuguucgacuucaacaagcaggccauccagagacugaaggccgaggcccagaugagcauccagcugaucaacaaggccgugaacgcccugaucaacgaccagcugaucaugaagaaccaccugagagacaucaugggcauccccuacugcaacuacagcaaguacugguaccugaaccacaccaccaccggcagaaccagccugcccaagugcuggcuggugagcaacggcagcuaccugaacgagacccacuucagcgacgacaucgagcagcaggccgacaacaugaucaccgagaugcugcagaaggaguacauggagagacagggcaagaccccccugggccugguggaccuguucguguucagcaccagcuucuaccugaucagcaucuuccugcaccuggugaagauccccugaggacuaguuauaagacugacuagcccgaugggccucccaacgggcccuccuccccuccuugcaccgagauuaaucaaaggcucuuuucagagccaccaaaaaaaaaaaaaaaaaaaaaaaaaaaaaaaaaaaaaaaaaaaaaaaaaaaaaaaaaaaaaaaaaaaaaaaaaaaaaaaaaaaaaaaaaaaaaaaaaaaaa

SEQ ID NO: 43110 - RNA, 1572 nt, Artificial Sequence
  mRNA product Design i-3 (hSL-A100) comprising derived and/or modified sequence from LASV(LP;Clade I)__AAF86701__GPCmut13 (opt4)
aggagaaagcuuaccaugggccagaucaucaccuucuuccaggaggugccccacgugaucgaggaggugaugaacaucgugcugaucgcccugagccugcuggccauccugaagggccuguacaacaucgccaccugcggcaucaucggccugguggccuuccuguuccugugcggcaagagcugcagccugacccugaagggcggcuacgagcugcagacccuggagcugaacauggagacccugaacaugaccaugccccugagcugcaccaagaacagcagccaccacuacaucagagugggcaacgagaccggccuggagcugacccugaccaacaccagcaucaucaaccacaaguucugcaaccugagcgacgcccacaagaagaaccuguacgaccacgcccugaugagcaucaucagcaccuuccaccugagcauccccaacuucaaccaguacgaggccaugagcugcgacuucaacggcggcaagaucagcgugcaguacaaccugagccacagcuacgccggcgacgccgccgagcacugcggcaccguggccaacggcgugcugcagaccuucaugagaauggccuggggcggcagauacaucgcccuggacagcggcaagggcaacugggacugcaucaugaccagcuaccaguaccugaucauccagaacaccaccugggaggaccacugccaguucagcagacccagccccaucggcuaccugggccugcugagccagagaaccagagacaucuacaucagcagaagacugcugggcaccuucaccuggacccugagcgacagcgagggcaacgagacccccggcggcuacugccugaccagauggaugcugaucgaggccgagcugaagugcuucggcaacaccgccguggccaagugcaacgagaagcacgacgaggaguucugcgacaugcugagacuguucgacuucaacaagcaggccaucagaagacugaaggccgaggcccagaugagcauccagcugaucaacaaggccgugaacgcccugaucaacgaccagcugaucaugaagaaccaccugagagacaucaugggcauccccuacugcaacuacagcaaguacugguaccugaaccacaccagcagcggcagaaccagccugcccaagugcuggcugaucagcaacggcagcuaccugaacgagacccaguucagcgacgacaucgagcagcaggccgacaacaugaucaccgagaugcugcagaaggaguacaucgagagacagggcaagaccccccugggccugguggacaucuucaucuucagcaccagcuucuaccugaucagcaucuuccugcaccugaucaagauccccugaggacuaguuauaagacugacuagcccgaugggccucccaacgggcccuccuccccuccuugcaccgagauuaaucaaaggcucuuuucagagccaccaaaaaaaaaaaaaaaaaaaaaaaaaaaaaaaaaaaaaaaaaaaaaaaaaaaaaaaaaaaaaaaaaaaaaaaaaaaaaaaaaaaaaaaaaaaaaaaaaaaaa

SEQ ID NO: 43111 - RNA, 1572 nt, Artificial Sequence
  mRNA product Design i-3 (hSL-A100) comprising derived and/or modified sequence from LASV(803213;Clade II)__AAF86703__GPCmut13 (opt4)
aggagaaagcuuaccaugggccagaucaucaccuucuuccaggaggugccccacgugaucgaggaggugaugaacaucgugcugaucgcccugagccugcuggccauccugaagggcaucuacaacguggccaccugcggccuguucggccugaucagcuuccugcugcugugcggcagaagcugcagcgugaccuacaagggcguguacgagcugcagacccuggagcugaacauggccaaccugaacaugaccaugccccugagcugcaccaagaacaacagccaccacuacaucauggugggcaacgagaccggccuggagcugacccugaccaacaccagcaucaucaaccacaaguucugcaaccugagcgacgcccacaagaagaaccuguacgaccacgcccugaugagcaucaucagcaccuuccaccugagcauccccaacuucaaccaguacgaggccaugagcugcgacuucaacggcggcaagaucagcgugcaguacaaccugagccacagcuucgccguggacgccgccaaccacugcggcaccaucgccaacggcgugcugcagaccuucaugagaauggccuggggcggcagcuacaucgcccuggacagcggcaagggcaacugggacugcaucaugaccagcuaccaguaccugaucauccagaacaccaccugggaggaccacugccaguucagcagacccagccccaucggcuaccugggccugcugagccagagaaccagagacaucuacaucagcagaagacugcugggcaccuucaccuggacccugagcgacagcgagggcaacgaggcccccggcggcuacugccugaccagauggaugcugaucgaggccgagcugaagugcuucggcaacaccgccguggccaagugcaacgagaagcacgacgaggaguucugcgacaugcugagacuguucgacuucaacaagcaggccaucaagagacugaagaccgaggcccagaugagcauccagcugaucaacaaggccgugaacgcccugaucaacgaccagcugaucaugaagaaccaccugagagacaucaugggcauccccuacugcaacuacagcagauacugguaccugaaccacaccgugaccggcaagaccagccugcccagaugcuggcuggugagcaacggcagcuaccugaacgagacccacuucagcgacgacaucgagcagcaggccgacaacaugaucaccgagaugcugcagaaggaguacauggacagacagggcaagaccccccugggccugguggaccuguucguguucagcaccagcuucuaccugaucagcaucuuccugcaccuggugaagauccccugaggacuaguuauaagacugacuagcccgaugggccucccaacgggcccuccuccccuccuugcaccgagauuaaucaaaggcucuuuucagagccaccaaaaaaaaaaaaaaaaaaaaaaaaaaaaaaaaaaaaaaaaaaaaaaaaaaaaaaaaaaaaaaaaaaaaaaaaaaaaaaaaaaaaaaaaaaaaaaaaaaaaa

SEQ ID NO: 43112 - RNA, 1572 nt, Artificial Sequence
  mRNA product Design i-3 (hSL-A100) comprising derived and/or modified sequence from LASV(GA391;Clade III)__CAA36645__GPCmut13 (opt4)
aggagaaagcuuaccaugggccagaucgugaccuucuuccaggaggugccccacgugaucgaggaggugaugaacaucgugcugaucgcccugagcauccuggccauccugaagggccuguacaacguggccaccugcggccugaucggccuggugaccuuccugcugcugagcggcagaagcugcagccugaucuacaagggcaccuacgagcugcagacccuggagcugaacauggagacccugaacaugaccaugccccugagcugcaccaagaacaacagccaccacuacaucagagugggcaacgagaccggccuggagcugacccugaccaacaccagcauccugaaccacaaguucugcaaccugagcgacgcccacaagagaaaccuguacgaccacagccugaugagcaucaucagcaccuuccaccugagcauccccaacuucaaccaguacgaggccaugagcugcgacuucaacggcggcaagaucaccgugcaguacaaccugagccacagcuucgccguggacgccgccggccacugcggcacccuggccaacggcgugcugcagaccuucaugagaauggccuggggcggcagcuacaucgcccuggacagcggcagaggcaacugggacugcaucaugaccagcuaccaguaccugaucauccagaacaccaccugggacgaccacugccaguucagcagacccagccccaucggcuaccugggccugcugagccagagaaccagagacaucuacaucagcagaagacugcugggcaccuucaccuggacccugagcgacagcgagggcaacgagacccccggcggcuacugccugaccagauggaugcugaucgaggccgagcugaagugcuucggcaacaccgccguggccaagugcaacgagaagcacgacgaggaguucugcgacaugcugagacuguucgacuucaacaagcaggccaucagaagacugaagaccgaggcccagaugagcauccagcugaucaacaaggccgugaacgcccugaucaacgaccagcugaucaugaagaaccaccugagagacaucaugggcauccccuacugcaacuacagcagauacugguaccugaaccacaccagcaccggcaagaccagccugcccagaugcuggcugaucagcaacggcagcuaccugaacgagaccaaguucagcgacgacaucgagcagcaggccgacaacaugaucaccgagaugcugcagaaggaguacaucgacagacagggcaagaccccccugggccugguggaccuguucguguucagcaccagcuucuaccugaucagcaucuuccugcaccuggugaagauccccugaggacuaguuauaagacugacuagcccgaugggccucccaacgggcccuccuccccuccuugcaccgagauuaaucaaaggcucuuuucagagccaccaaaaaaaaaaaaaaaaaaaaaaaaaaaaaaaaaaaaaaaaaaaaaaaaaaaaaaaaaaaaaaaaaaaaaaaaaaaaaaaaaaaaaaaaaaaaaaaaaaaaa

SEQ ID NO: 43113 - RNA, 1575 nt, Artificial Sequence
  mRNA product Design i-3 (hSL-A100) comprising derived and/or modified sequence from LASV(AV;Clade V)__CCA30314__GPCmut13 (opt4)
aggagaaagcuuaccaugggccagaucgugaccuucuuccaggaggugccccacgugaucgaggaggugaugaacaucgugcugaucgcccugagcauccuggccgugcugaagggccuguacaacaucgccaccugcggccugaucggccugaucaccuuccugcugcugugcggcagaagcugcagcagcaaccuguacaagggcguguacgagcugcagagccuggaccugaacauggagacccugaacaugaccaugccccugagcugcaccaagaacaacagccaccacuacaucagagugggcaacgacaccggccuggagcugacccugaccaacaccagcauccugaaccacaaguucugcaaccugagcgacgcccacaagaaggaccuguacgaccacgcccugaugagcaucaucagcaccuuccaccugagcauccccaacuucaaccaguacgaggccaugagcugcgacuucaacggcggcaagaucagcgugcaguacaaccugagccacagcuacgccaucgacgccgccaaccacugcggcaccguggccaacggcauccugcagaccuucaugagaauggccuggggcggcagcuacaucgcccuggacagcggcagaggcaacugggacugcaucaugaccagcuaccaguaccugaucauccagaacaccaccugggagaaccacugccaguucagcagacccagccccaucggcuaccugggccugcugagccagagaaccagagacaucuacaucagcagaagacugcugggcaccuucaccuggacccugagcgacagcgagggcaacgccacccccggcggcuacugccugaccagauggaugcugaucgaggccgagcugaagugcuucggcaacaccgccguggccaagugcaacgagaagcacgacgaggaguucugcgacaugcugagacuguucgacuucaacaagcaggccaucagcagacugaagagcgaggcccagaugagcauccagcugaucaacaaggccgugaacgcccugaucaacgaccagcugaucaugaagaaccaccugagagacaucaugggcauccccuacugcaacuacagcaaguacugguaccugaaccacaccaucaccggcaagaccagccugcccaagugcuggcuggugagcaacggcagcuaccugaacgagacccacuucagcgacgacaucgagcagcaggccgacaacaugaucaccgagaugcugcagaaggaguacauggagagacagggcaagaccccccugggccugguggaccuguucguguucagcaccagcuucuaccugaucagcaucuuccugagacuggugaagauccccugaggacuaguuauaagacugacuagcccgaugggccucccaacgggcccuccuccccuccuugcaccgagauuaaucaaaggcucuuuucagagccaccaaaaaaaaaaaaaaaaaaaaaaaaaaaaaaaaaaaaaaaaaaaaaaaaaaaaaaaaaaaaaaaaaaaaaaaaaaaaaaaaaaaaaaaaaaaaaaaaaaaaa

SEQ ID NO: 43114 - RNA, 1572 nt, Artificial Sequence
  mRNA product Design i-3 (hSL-A100) comprising derived and/or modified sequence from LASV(Togo/2016/7082;Clade VI)__AMR44577__GPCmut13 (opt4)
aggagaaagcuuaccaugggccagaucaucaccuucuuccaggaggugccccacgugaucgaggaggugaugaacaucgugcugaucgcccugagccugcuggccauccugaagggcguguacaacguggccaccugcggcaucaucggccuggugaccuuccuguuccugugcggcagaagcugcagccugaucuacaagggcagcuacgagcugcagacccuggagcugaacauggagacccugaacaugaccaugccccugagcugcaccaagaacagcagccaccacuacaucagagugggcaacgagaccggccuggagcugacccugaccaacaccagcaucaucaaccacaaguucugcaaccugagcgacgcccacaagagaaaccuguacgaccacgcccugaugagcauccugagcaccuuccaccugagcauccccaacuucaaccaguacgaggccaugagcugcgacuucaacggcggcaagaucagcgugcaguacaaccugagccacgccuacgccguggacgccgccgagcacugcggcaccguggccaacggcgugcugcagaccuucaugagaauggccuggggcggcagcuacaucgcccuggacagcggcagaggcaacugggacugcaucaugaccagcuaccaguaccugaucauccagaacaccaccugggaggaccacugccaguucagcagacccagccccaucggcuaccugggccugcugagccagagaaccagagacaucuacaucagcagaagacugcugggcaccuucaccuggacccugagcgacagcgagggcaacgagacccccggcggcuacugccugaccagauggaugcugaucgaggccgagcugaagugcuucggcaacaccgccguggccaagugcaacgagaagcacgacgaggaguucugcgacaugcugagacuguucgacuucaacaagcaggccauccagagacugaagagcgaggcccagaugagcauccagcugaucaacaaggccgugaacgcccugaucaacgaccagcugaucaugaagaaccaccugagagacaugaugggcauccccuacugcaacuacagcaaguacugguaccugaaccacaccagcagcggcagaaccagccugcccaagugcuggcuggugagcaacggcagcuaccugaacgagacccacuucagcgacgacaucgagcagcaggccgacaacaugaucaccgagaugcugcagaaggaguacaucgacagacagggcaagaccccccugggccugguggaccuguucguguucagcaccagcuucuaccugaucagcaucuuccugcaccugaucaagauccccugaggacuaguuauaagacugacuagcccgaugggccucccaacgggcccuccuccccuccuugcaccgagauuaaucaaaggcucuuuucagagccaccaaaaaaaaaaaaaaaaaaaaaaaaaaaaaaaaaaaaaaaaaaaaaaaaaaaaaaaaaaaaaaaaaaaaaaaaaaaaaaaaaaaaaaaaaaaaaaaaaaaaa

SEQ ID NO: 43115 - RNA, 1572 nt, Artificial Sequence
  mRNA product Design i-3 (hSL-A100) comprising derived and/or modified sequence from LASV(KAK-428;Clade n.d. (VII))__ANH09740__GPCmut13 (opt4)
aggagaaagcuuaccaugggccagaucgugaccuucuuccaggaggugccccacgugaucgaggaggugaugaacaucgugcugaucgcccugagccugcuggccauccugaagggccuguacaacuucgccaccugcggcgugaucggccugaucaccuuccugcugcugugcggcagaagcugcagcgccaccuacaagggccaguacgagcugcagacccuggagcugaacauggagagccugaacaugaccaugccccugagcugcaccaagaacaacagccaccacuacaucagagccggcaacaacaccggccuggagcugacccugaccaacaccagcaucaucagccacaaguucugcaaccugagcgacgcccacaagaagaaccuguacgaccacacccugaugagcaucaucaccaccuuccaccugagcauccccaacuucaaccaguacgaggccaugagcugcgacuucaacggcggcaagaucagcauccaguacaaccugagccacagcuacgccggcgacgccgcccagcacugcggcaccguggccaacggcgugcugcagaccuucaugagaauggccuggggcggcagcuaccuggcccuggacagcggcagaagaggcugggacugcaucaucagcagcuaccaguaccugaucauccagaacaccaccugggacgaccacugccaguucagcagacccagccccaucggcuaccugggcuucgugagccagaagaccagagacaucuacaucagcagaagacugcugggcaccuucaccuggacccugagcgacagcgagggccacgacaugcccggcggcuacugccugaccagauggaugcugaucgaggccgaccugaagugcuucggcaacaccgccguggccaagugcaacgagaagcacgacgaggaguucugcgacauguggagacuguucgacuucaacaagcaggccauccagagacugaaggccgaggcccagaugaacauccagcugaucaacaaggccgugaacgcccugaucaacgaccagcugaugaugaagaaccaccugagagacaucaugggcauccccuacugcaacuacagcaaguucugguaccugaacaacaccaccaccggcagaaccagccugcccagaugcuggcugaucagcaacggcagcuaccugaacgagacccacuucagcgacgacaucgagcagcaggccgacaacaugaucaccgagaugcugcagaaggaguacauggacagacagggcaagaccccccugggccugguggaccuguucguguucagcaccagcuucuaccugaucaccaucuuccugcaccuggugaagauccccugaggacuaguuauaagacugacuagcccgaugggccucccaacgggcccuccuccccuccuugcaccgagauuaaucaaaggcucuuuucagagccaccaaaaaaaaaaaaaaaaaaaaaaaaaaaaaaaaaaaaaaaaaaaaaaaaaaaaaaaaaaaaaaaaaaaaaaaaaaaaaaaaaaaaaaaaaaaaaaaaaaaaa

SEQ ID NO: 43116 - RNA, 1572 nt, Artificial Sequence; identical to SEQ ID NO: 43110
  mRNA product Design i-3 (hSL-A100) comprising derived and/or modified sequence from LASV(Pinneo-NIG-1969;Clade I)__AIT17836__GPCmut13 (opt4)

SEQ ID NO: 43117 - RNA, 1572 nt, Artificial Sequence
  mRNA product Design i-3 (hSL-A100) comprising derived and/or modified sequence from LASV(ISTH0009-NIG-2011;Clade II)__AIT17404__GPCmut13 (opt4)
aggagaaagcuuaccaugggccagaucaucaccuucuuccaggaggugccccacgugaucgaggaggugaugaacaucgugcugaucgcccugagccugcuggccauccugaagggcaucuacaacguggccaccugcggccuguucggccuggugagcuuccugcugcugugcggcagaagcugcagcaccaccuacaagggcguguacgagcugcagacccuggagcuggacauggccagccugaacaugaccaugccccugagcugcaccaagaacaacagccaccacuacaucauggugggcaacgagaccggccuggagcugacccugaccaacaccagcaucaucaaccacaaguucugcaaccugagcgacgcccacaagaagaaccuguacgaccacgcccugaugagcaucaucagcaccuuccaccugagcauccccaacuucaaccaguacgaggccaugagcugcgacuucaacggcggcaagaucagcgugcaguacaaccugagccacgccuacgccguggacgccgccaaccacugcggcaccaucgccaacggcgugcugcagaccuucaugagaauggccuggggcggcagcuacaucgcccuggacagcggcaagggcagcugggacugcaucaugaccagcuaccaguaccugaucauccagaacaccaccugggaggaccacugccaguucagcagacccagccccaucggcuaccugggccugcugagccagagaaccagagacaucuacaucagcagaagacugcugggcaccuucaccuggacccugagcgacagcgagggcaacgagacccccggcggcuacugccugaccagauggaugcugaucgaggccgagcugaagugcuucggcaacaccgccguggccaagugcaacgagaagcacgacgaggaguucugcgacaugcugagacuguucgacuucaacaagcaggccaucagaagacugaagaccgaggcccagaugagcauccagcugaucaacaaggccgugaacgcccugaucaacgaccagcugaucaugaagaaccaccugagagacaucaugggcauccccuacugcaacuacagcaaguacugguaccugaaccacaccgugaccggcaagaccagccugcccagaugcuggcuggugagcaacggcagcuaccugaacgagacccacuucagcgacgacaucgagcagcaggccgacaacaugaucaccgagcugcugcagaaggaguacauggacagacagggcaagaccccccugggccugguggaccuguucguguucagcaccagcuucuaccugaucagcaucuuccugcaccugaucaagauccccugaggacuaguuauaagacugacuagcccgaugggccucccaacgggcccuccuccccuccuugcaccgagauuaaucaaaggcucuuuucagagccaccaaaaaaaaaaaaaaaaaaaaaaaaaaaaaaaaaaaaaaaaaaaaaaaaaaaaaaaaaaaaaaaaaaaaaaaaaaaaaaaaaaaaaaaaaaaaaaaaaaaaa

SEQ ID NO: 43118 - RNA, 1572 nt, Artificial Sequence
  mRNA product Design i-3 (hSL-A100) comprising derived and/or modified sequence from LASV(ISTH2010-NIG-2012;Clade II)__AIT17482__GPCmut13 (opt4)
aggagaaagcuuaccaugggccagaucaucaccuucuuccaggaggugccccacgugaucgaggaggugaugaacaucgugcugaucgcccugagccugcuggccauccugaagggcaucuacaacguggccaccugcggccuguucggccuggugagcuuccugcugcugugcggcagaagcugcagcaccaccuacaagggcguguacgagcugcagacccuggagcuggacauggccagccugaacaugaccaugccccugagcugcaccaagaacaacagccaccacuacaucauggugggcaacgagaccggccuggagcugacccugaccaacaccagcaucaucaaccacaaguucugcaaccugagcgacgcccacaagaagaaccuguacgaccacgcccugaugagcaucaucagcaccuuccaccugagcauccccaacuucaaccaguacgaggccaugagcugcgacuucaacggcggcaagaucagcgugcaguacaaccugagccacgccuacgccguggacgccgccaaccacugcggcaccaucgccaacggcgugcugcagaccuucaugagaauggccuggggcggcagcuacaucgcccuggacagcggcaagggcagcugggacugcaucaugaccagcuaccaguaccugaucauccagaacaucaccugggaggaccacugccaguucagcagacccagccccaucggcuaccugggccugcugagccagagaaccagagacaucuacaucagcagaagacugcugggcaccuucaccuggacccugagcgacagcgagggcaacgagacccccggcggcuacugccugaccagauggaugcugaucgaggccgagcugaagugcuucggcaacaccgccguggccaagugcaacgagaagcacgacgaggaguucugcgacaugcugagacuguucgacuucaacaagcaggccaucagaagacugaagaccgaggcccagaugagcauccagcugaucaacaaggccgugaacgcccugaucaacgaccagcugaucaugaagaaccaccugagagacaucaugggcauccccuacugcaacuacagcaaguacugguaccugaaccacaccgugaccggcaagaccagccugcccagaugcuggcuggugagcaacggcagcuaccugaacgagacccacuucagcgacgacaucgagcagcaggccgacaacaugaucaccgagcugcugcagaaggaguacaucgacagacagggcaagaccccccugggccugguggaccuguucguguucagcaccagcuucuaccugaucagcaucuuccugcaccuggugaagauccccugaggacuaguuauaagacugacuagcccgaugggccucccaacgggcccuccuccccuccuugcaccgagauuaaucaaaggcucuuuucagagccaccaaaaaaaaaaaaaaaaaaaaaaaaaaaaaaaaaaaaaaaaaaaaaaaaaaaaaaaaaaaaaaaaaaaaaaaaaaaaaaaaaaaaaaaaaaaaaaaaaaaaa

SEQ ID NO: 43119 - RNA, 1572 nt, Artificial Sequence
  mRNA product Design i-3 (hSL-A100) comprising derived and/or modified sequence from LASV(Lassa virus/H.sapiens-wt/NGA/2015/ISTH_0543;Clade II)__AVO03639__GPCmut13 (opt4)
aggagaaagcuuaccaugggccagaucaucaccuucuuccaggaggugccccacgugaucgaggaggugaugaacaucgugcugaucgcccugagccugcuggccauccugaagggcaucuacaacguggccaccugcggccuguucggccuggugagcuuccugcugcugugcggcagaagcugcagcaccaccuacaagggcguguacgagcugcagacccuggagcuggacauggccaaccugaacaugaccaugccccugagcugcaccaagaacaacagccaccacuacaucauggugggcaacgagaccggccuggagcugacccugaccaacaccagcaucaucaaccacaaguucugcaaccugagcgacgcccacaagaagaaccuguacgaccacgcccugaugagcaucaucagcaccuuccaccugagcauccccaacuucaaccaguacgaggccaugagcugcgacuucaacggcggcaagaucagcgugcaguacaaccugagccacaccuacgccguggacgccgccaaccacugcggcaccaucgccaacggcgugcugcagaccuucaugagaauggccuggggcggcagcuacaucgcccuggacagcggcaagggcagcugggacugcaucaugaccagcuaccaguaccuggugauccagaacaccaccugggaggaccacugccaguucagcagacccagccccaucggcuaccugggccugcugagccagagaaccagagacaucuacaucagcagaagacugcugggcaccuucaccuggacccugagcgacagcgagggcaacgagacccccggcggcuacugccugaccagauggaugcugaucgaggccgagcugaagugcuucggcaacaccgccguggccaagugcaacgagaagcacgacgaggaguucugcgacaugcugagacuguucgacuucaacaagcaggccaucagaagacugaagaccgaggcccagaugagcauccagcugaucaacaaggccgugaacgcccugaucaacgaccagcugaucaugaagaaccaccugagagacaucaugggcauccccuacugcaacuacagcaaguacugguaccugaaccacaccgugaccggcaagaccagccugcccagaugcuggcuggugagcaacggcagcuaccugaacgagacccacuucagcgacgacaucgagcagcaggccgacaacaugaucaccgagcugcugcagaaggaguacaucgacagacagggcaagaccccccugggccugguggaccuguucguguucagcaccagcuucuaccugaucagcaucuuccugcaccuggugaagauccccugaggacuaguuauaagacugacuagcccgaugggccucccaacgggcccuccuccccuccuugcaccgagauuaaucaaaggcucuuuucagagccaccaaaaaaaaaaaaaaaaaaaaaaaaaaaaaaaaaaaaaaaaaaaaaaaaaaaaaaaaaaaaaaaaaaaaaaaaaaaaaaaaaaaaaaaaaaaaaaaaaaaaa

SEQ ID NO: 43120 - RNA, 1572 nt, Artificial Sequence
  mRNA product Design i-3 (hSL-A100) comprising derived and/or modified sequence from LASV(Lassa virus/H.sapiens-wt/NGA/2016/ISTH_0009;Clade II)__AVO03571__GPCmut13 (opt4)
aggagaaagcuuaccaugggccagaucaucaccuucuuccaggaggugccccacgugaucgaggaggugaugaacaucgugcugaucgcccugagccugcuggccauccugaagggcaucuacaacguggccaccugcggccugcugggccuggugagcuuccugcugcugugcggcagaagcugcagcaccaccuacaagggcguguacgagcugcagacccuggagcuggacauggccagccugaacaugaccaugccccugagcugcaccaagaacaacagccaccacuacaucauggugggcaacgagaccggccuggagcugacccugaccaacaccagcaucaucaaccacaaguucugcaaccugagcgacgcccacaagaagaaccuguacgaccacgcccugaugagcaucaucagcaccuuccaccugagcauccccaacuucaaccaguacgaggccaugagcugcgacuucaacggcggcagaaucagcgugcaguacaaccugagccacagcuacgccguggacgccgccaaccacugcggcaccaucgccaacggcgugcugcagaccuucaugagaauggccuggggcggcagcuacaucgcccuggacagcggcaagggcagcugggacugcaucaugaccagcuaccaguaccugaucauccagaacaccaccugggaggaccacugccaguucagcagacccagccccaucggcuaccugggccugcugagccagagaaccagagacaucuacaucagcagaagacugcugggcaccuucaccuggacccugagcgacagcgagggcaacgagacccccggcggcuacugccugaccagauggaugcugaucgaggccgagcugaagugcuucggcaacaccgccguggccaagugcaacgagaagcacgacgaggaguucugcgacaugcugagacuguucgacuucaacaagcaggccaucagaagacugaagaccgaggcccagaugagcauccagcugaucaacaaggccgugaacgcccugaucaacgaccagcugaucaugaagaaccaccugagagacaucaugggcauccccuacugcaacuacagcaaguacugguaccugaaccacaccgugaccggcaagaccagccugcccagaugcuggcuggugagcaacggcagcuaccugaacgagacccacuucagcgacgacaucgagcagcaggccgacaacaugaucaccgagcugcugcagaaggaguacaucgacagacagggcaagaccccccugggccugguggaccuguucguguucagcaccagcuucuaccugaucagcaucuuccugcaccuggugaagauccccugaggacuaguuauaagacugacuagcccgaugggccucccaacgggcccuccuccccuccuugcaccgagauuaaucaaaggcucuuuucagagccaccaaaaaaaaaaaaaaaaaaaaaaaaaaaaaaaaaaaaaaaaaaaaaaaaaaaaaaaaaaaaaaaaaaaaaaaaaaaaaaaaaaaaaaaaaaaaaaaaaaaaa

SEQ ID NO: 43121 - RNA, 1572 nt, Artificial Sequence
  mRNA product Design i-3 (hSL-A100) comprising derived and/or modified sequence from LASV(Lassa virus/H.sapiens-wt/NGA/2016/ISTH_0017;Clade II)__AVO03567__GPCmut13 (opt4)
aggagaaagcuuaccaugggccagaucaucaccuucuuccaggaggugccccacgugaucgaggaggugaugaacaucgugcugaucgcccugagccugcuggccauccugaagggcaucuacaacguggccaccugcggccuguucggccuggugagcuuccugcugcugugcggcagaagcugcagcaccaccuacaagggcguguacgagcugcagacccuggagcuggacauggccagccugaacaugaccaugccccugagcugcaccaagaacaacagccaccacuacaucauggugggcaacgagaccggccuggagcugacccugaccaacaccagcaucaucaaccacaaguucugcaaccugagcgacgcccacaagaagaaccuguacgaccacgcccugaugagcaucaucagcaccuuccaccugagcauccccaacuucaaccaguacgaggccaugagcugcgacuucaacggcggcaagaucagcgugcaguacaaccugagccacaccuacgccaucgacgccgccaaccacugcggcaccaucgccaacggcgugcugcagaccuucaugagaauggccuggggcggcagcuacaucgcccuggacagcggcaagggcagcugggacugcaucaugaccagcuaccaguaccugaucauccagaacaccaccugggaggaccacugccaguucagcagacccagccccaucggcuaccugggccugcugagccagagaaccagagacaucuacaucagcagaagacugcugggcaccuucaccuggacccugagcgacagcgagggcaacgagacccccggcggcuacugccugaccagauggaugcugaucgaggccgagcugaagugcuucggcaacaccgccguggccaagugcaacgagaagcacgacgaggaguucugcgacaugcugagacuguucgacuucaacaagcaggccaucagaagacugaagaccgaggcccagaugagcauccagcugaucaacaaggccgugaacgcccugaucaacgaccagcugaucaugaagaaccaccugagagacaucaugggcauccccuacugcaacuacagcaaguacugguaccugaaccacaccgugaccggcaagaccagccugcccagaugcuggcuggugagcaacggcagcuaccugaacgagacccacuucagcgacgacaucgagcagcaggccgacaacaugaucaccgagcugcugcagaaggaguacauggacagacagggcaagaccccccugggccugguggaccuguucguguucagcaccagcuucuaccugaucagcaucuuccugcaccuggugagaauccccugaggacuaguuauaagacugacuagcccgaugggccucccaacgggcccuccuccccuccuugcaccgagauuaaucaaaggcucuuuucagagccaccaaaaaaaaaaaaaaaaaaaaaaaaaaaaaaaaaaaaaaaaaaaaaaaaaaaaaaaaaaaaaaaaaaaaaaaaaaaaaaaaaaaaaaaaaaaaaaaaaaaaa

SEQ ID NO: 43122 - RNA, 1572 nt, Artificial Sequence
  mRNA product Design i-3 (hSL-A100) comprising derived and/or modified sequence from LASV(Lassa virus/H.sapiens-wt/NGA/2018/ISTH_0959;Clade II)__AVV65099__GPCmut13 (opt4)
aggagaaagcuuaccaugggccagaucaucaccuucuuccaggaggugccccacgugaucgaggaggugaugaacaucgugcugaucgcccugagccugcuggccauccugaagggcaucuacaacguggugaccugcggccuguucggccuggugagcuuccugcugcugugcggcagaagcugcagcaccaccuacaagggcguguacgagcugcagacccuggagcuggacauggccagccugaacaugaccaugccccugagcugcaccaagaacaacagccaccacuacaucauggugggcaacgagaccggccuggagcugacccugaccaacaccagcaucaucaaccacaaguucugcaaccugagcgacgcccacaagaagaaccuguacgaccacgcccugaugagcaucaucagcaccuuccaccugagcauccccaacuucaaccaguacgaggccaugagcugcgacuucaacggcggcaagaucagcgugcaguacaaccugagccacgccuacgccaucgacgccgccaaccacugcggcaccaucgccaacggcgugcugcagaccuucaugagaauggccuggggcggcagcuacaucgcccuggacagcggcaagggcagcugggacugcaucaugaccagcuaccaguaccugaucauccagaacaccaccugggaggaccacugccaguucagcagacccagccccaucggcuaccugggccugcugagccagagaaccagagacaucuacaucagcagaagacugcugggcaccuucaccuggacccugagcgacagcgagggcaacgagacccccggcggcuacugccugaccagauggaugcugaucgaggccgagcugaagugcuucggcaacaccgccguggccaagugcaacgagaagcacgacgaggaguucugcgacaugcugagacuguucgacuucaacaagcaggccaucagaagacugaagaccgaggcccagaugagcauccagcugaucaacaaggccgugaacgcccugaucaacgaccagcugaucaugaagaaccaccugagagacaucaugggcauccccuacugcaacuacagcaaguacugguaccugaaccacaccgugaccggcaagaccagccugcccagaugcuggcuggugagcaacggcagcuaccugaacgagacccacuucagcgacgacaucgagcagcaggccgacaacaugaucaccgagcugcugcagaaggaguacaucgacagacagggcaagaccccccugggccugguggaccuguucguguucagcaccagcuucuaccugaucagcaucuuccugcaccuggugaagauccccugaggacuaguuauaagacugacuagcccgaugggccucccaacgggcccuccuccccuccuugcaccgagauuaaucaaaggcucuuuucagagccaccaaaaaaaaaaaaaaaaaaaaaaaaaaaaaaaaaaaaaaaaaaaaaaaaaaaaaaaaaaaaaaaaaaaaaaaaaaaaaaaaaaaaaaaaaaaaaaaaaaaaa

SEQ ID NO: 43123 - RNA, 1572 nt, Artificial Sequence
  mRNA product Design i-3 (hSL-A100) comprising derived and/or modified sequence from LASV(LASV003-NIG-2008;Clade II)__AIT17580__GPCmut13 (opt4)
aggagaaagcuuaccaugggccagaucaucaccuucuuccaggaggugccccacgugaucgaggaggugaugaacaucgugcugaucgcccugagccugcuggccauccugaagggcaucuacaacguggccaccugcggccuguucggccuggugagcuuccugcugcugugcggcagaagcugcagcaccaccuacaagggcguguacgagcugcagacccuggagcuggacauggccagccugaacaugaccaugccccugagcugcaccaagaacaacagccaccacuacaucauggugggcaacgagaccggccuggagcugacccugaccaacaccagcaucaucaaccacaaguucugcaaccugagcgacgcccacaagaagaaccuguacgaccacgcccugaugagcaucaucagcaccuuccaccugagcauccccaacuucaaccaguacgaggccaugagcugcgacuucaacggcggcaagaucagcgugcaguacaaccugagccacaccuacgccguggacgccgccaaccacugcggcaccaucgccaacggcgugcugcagaccuucaugagaauggccuggggcggcagcuacaucgcccuggacagcggcaagggcagcugggacugcaucaugaccagcuaccaguaccugaucauccagaacaccaccugggaggaccacugccaguucagcagacccagccccaucggcuaccugggccugcugagccagagaaccagagacaucuacaucagcagaagacugcugggcaccuucaccuggacccugagcgacagcgagagcaacgagacccccggcggcuacugccugaccagauggaugcugaucgaggccgagcugaagugcuucggcaacaccgccguggccaagugcaacgagaagcacgacgaggaguucugcgacaugcugagacuguucgacuucaacaagcaggccaucagaagacugaaggccgaggcccagaugagcauccagcugaucaacaaggccgugaacgcccugaucaacgaccagcugaucaugaagaaccaccugagagacaucaugggcauccccuacugcaacuacagcaaguacugguaccugaaccacaccgugaccggcagaaccagccugcccagaugcuggcuggugagcaacggcagcuaccugaacgagacccacuucagcgacgacaucgagcagcaggccgacaacaugaucaccgagcugcugcagaaggaguacauggacagacagggcaagaccccccugggccugguggaccuguucguguucagcaccagcuucuaccugaucagcaucuuccugcaccuggugaagauccccugaggacuaguuauaagacugacuagcccgaugggccucccaacgggcccuccuccccuccuugcaccgagauuaaucaaaggcucuuuucagagccaccaaaaaaaaaaaaaaaaaaaaaaaaaaaaaaaaaaaaaaaaaaaaaaaaaaaaaaaaaaaaaaaaaaaaaaaaaaaaaaaaaaaaaaaaaaaaaaaaaaaaa

SEQ ID NO: 43124 - RNA, 1572 nt, Artificial Sequence
  mRNA product Design i-3 (hSL-A100) comprising derived and/or modified sequence from LASV(LASV035-NIG-2009;Clade II)__AIT17588__GPCmut13 (opt4)
aggagaaagcuuaccaugggccagaucaucaccuucuuccaggaggugccccacgugaucgaggaggugaugaacaucgugcugaucgcccugagccugcuggccauccugaagggcaucuacaacguggccaccugcggccuguucggccuggugagcuuccugcugcugugcggcagaagcugcagcaccaccuacaagggcguguacgagcugcagacccuggagcuggacauggccagccugaacaugaccaugccccugagcugcaccaagaacaacagccaccacuacaucauggugggcaacgagaccggccuggagcugacccugaccaacaccagcaucaucaaccacaaguucugcaaccugagcgacgcccacaagaagaaccuguacgaccacgcccugaugagcaucaucagcaccuuccaccugagcauccccaacuucaaccaguacgaggccaugagcugcgacuucaacggcggcaagaucagcgugcaguacaaccugagccacgccuacgccguggacgccgccaaccacugcggcaccaucgccaacggcgugcugcagaccuucaugagaauggccuggggcggcagcuacaucgcccuggacagcggcaagggcagcugggacugcaucaugaccagcuaccaguaccugaucauccagaacaccaccugggaggaccacugccaguucagcagacccagccccaucggcuaccugggccugcugagccagagaaccagagacaucuacaucagcagaagacugcugggcaccuucaccuggacccugagcgacagcgagggcaacgagacccccggcggcuacugccugaccagauggaugcugaucgaggccgagcugaagugcuucggcaacaccgccguggccaagugcaacgagaagcacgacgaggaguucugcgacaugcugagacuguucgacuucaacaagcaggccaucagaagacugaaggccgaggcccagaugagcauccagcugaucaacaaggccgugaacgcccugaucaacgaccagcugaucaugaagaaccaccugagagacaucaugggcauccccuacugcaacuacagcaaguacugguaccugaaccacaccgugaccggcaagaccagccugcccagaugcuggcuggugagcaacggcagcuaccugaacgagacccacuucagcgacgacaucgagcagcaggccgacaacaugaucaccgagcugcugcagaaggaguacaucgacagacagggcaagaccccccugggccugguggaccuguucguguucagcaccagcuucuaccugaucagcaucuuccugcaccuggugaagauccccugaggacuaguuauaagacugacuagcccgaugggccucccaacgggcccuccuccccuccuugcaccgagauuaaucaaaggcucuuuucagagccaccaaaaaaaaaaaaaaaaaaaaaaaaaaaaaaaaaaaaaaaaaaaaaaaaaaaaaaaaaaaaaaaaaaaaaaaaaaaaaaaaaaaaaaaaaaaaaaaaaaaaa

SEQ ID NO: 43125 - RNA, 1572 nt, Artificial Sequence
  mRNA product Design i-3 (hSL-A100) comprising derived and/or modified sequence from LASV(LASV1000-NIG-2009;Clade II)__AIT17782__GPCmut13 (opt4)
aggagaaagcuuaccaugggccagaucaucaccuucuuccaggaggugccccacgugaucgaggaggugaugaacaucgugcugaucgcccugagccugcuggccauccugaagggcaucuacaacguggccaccugcggccuguucggccuggugagcuuccugcugcugugcggcagaagcugcagcaccaccuacaagggcguguacgagcugcagacccuggagcuggacauggccagccugaacaugaccaugccccugagcugcaccaagaacaacagccaccacuacaucauggugggcaacgagaccggccuggagcugacccugaccaacaccagcaucaucaaccacaaguucugcaaccugagcgacgcccacaagaagaaccuguacgaccacgcccugaugagcaucaucagcaccuuccaccugagcauccccaacuucaaccaguacgaggccaugagcugcgacuucaacggcggcaagaucagcgugcaguacaaccugagccacaccuacgccguggacgccgccaaccacugcggcaccaucgccaacggcgugcugcagaccuucaugagaauggccuggggcggcagcuacaucgcccuggacagcggcaagggcagcugggacugcaucaugaccagcuaccaguaccugaucauccagaacaccaccugggaggaccacugccaguucagcagacccagccccaucggcuaccugggccugcugagccagagaaccagagacaucuacaucagcagaagacugcugggcaccuucaccuggacccugagcgacagcgagggcaacgagacccccggcggcuacugccugaccagauggaugcugaucgaggccgagcugaagugcuucggcaacaccgccguggccaagugcaacgagaagcacgacgaggaguucugcgacaugcugagacuguucgacuucaacaagcaggccaucaagagacugaagaccgaggcccagaugagcauccagcugaucaacaaggccgugaacgcccugaucaacgaccagcugaucaugaagaaccaccugagagacaucaugggcauccccuacugcaacuacagcaaguacugguaccugaaccacaccgugaccggcaagaccagccugcccagaugcuggcuggugagcaacggcagcuaccugaacgagacccacuucagcgacgacaucgagcagcaggccgacaacaugaucaccgagcugcugcagaaggaguacaucgacagacagggcaagaccccccugggccugguggaccuguucguguucagcaccagcuucuaccugaucagcaucuuccugcaccuggugaagauccccugaggacuaguuauaagacugacuagcccgaugggccucccaacgggcccuccuccccuccuugcaccgagauuaaucaaaggcucuuuucagagccaccaaaaaaaaaaaaaaaaaaaaaaaaaaaaaaaaaaaaaaaaaaaaaaaaaaaaaaaaaaaaaaaaaaaaaaaaaaaaaaaaaaaaaaaaaaaaaaaaaaaaa

SEQ ID NO: 43126 - RNA, 1572 nt, Artificial Sequence
  mRNA product Design i-3 (hSL-A100) comprising derived and/or modified sequence from LASV(LASV221-NIG-2010;Clade II)__AIT17624__GPCmut13 (opt4)
aggagaaagcuuaccaugggccagaucaucaccuucuuccaggaggugccccacgugaucgaggaggugaugaacaucgugcugaucgcccugagccugcuggccauccugaagggcaucuacaacguggccaccugcggccuguucggccuggugagcuuccugcugcugugcggcagaagcugcagcaccaccuacaagggcguguacgagcugcagacccuggagcuggacauggccagccugaacaugaccaugccccugagcugcaccaagaacaacagccaccacuacaucauggugggcaacgagaccggccuggagcugacccugaccaacaccagcaucaucaaccacaaguucugcaaccugagcgacgcccacaagaagaaccuguacgaccacgcccugaugagcaucaucagcaccuuccaccugagcauccccaacuucaaccaguacgaggccaugagcugcgacuucaacggcggcaagaucagcgugcaguacaaccugagccacaccuacgccaucgacgccgccaaccacugcggcaccaucgccaacggcgugcugcagaccuucaugagaauggccuggggcggcagcuacaucgcccuggacagcggcaagggcagcugggacugcaucaugaccagcuaccaguaccugaucauccagaacaccaccugggaggaccacugccaguucagcagacccagccccaucggcuaccugggccugcugagccagagaaccagagacaucuacaucagcagaagacugcugggcaccuucaccuggacccugagcgacagcgagggcaacgagacccccggcggcuacugccugaccagauggaugcugaucgaggccgagcugaagugcuucggcaacaccgccguggccaagugcaacgagaagcacgacgaggaguucugcgacaugcugagacuguucgacuucaacaagcaggccaucagaagacugaagaccgaggcccagaugagcauccagcugaucaacaaggccgugaacgcccugaucaacgaccagcugaucaugaagaaccaccugagagacaucaugggcauccccuacugcaacuacagcaaguacugguaccugaaccacaccgugaccggcaagaccagccugcccagaugcuggcuggugagcaacggcagcuaccugaacgagacccacuucagcgacgacaucgagcagcaggccgacaacaugaucaccgagaugcugcagaaggaguacauggacagacagggcaagaccccccugggccugguggaccuguucguguucagcaccagcuucuaccugaucagcaucuuccugcaccuggugaagauccccugaggacuaguuauaagacugacuagcccgaugggccucccaacgggcccuccuccccuccuugcaccgagauuaaucaaaggcucuuuucagagccaccaaaaaaaaaaaaaaaaaaaaaaaaaaaaaaaaaaaaaaaaaaaaaaaaaaaaaaaaaaaaaaaaaaaaaaaaaaaaaaaaaaaaaaaaaaaaaaaaaaaaa

SEQ ID NO: 43127 - RNA, 1572 nt, Artificial Sequence
  mRNA product Design i-3 (hSL-A100) comprising derived and/or modified sequence from LASV(LASV237-NIG-2010;Clade II)__AIT17638__GPCmut13 (opt4)
aggagaaagcuuaccaugggccagaucaucaccuucuuccaggaggugccccacgugaucgaggaggugaugaacaucgugcugaucgcccugagccugcuggccauccugaagggcaucuacaacguggccaccugcggccuguucggccuggugagcuuccugcugcugugcggcagaagcugcagcaccaccuacaagggcguguacgagcugcagacccuggagcuggacauggccagccugaacaugaccaugccccugagcugcaccaagaacaacagccaccacuacaucauggugggcaacgagaccggccuggagcugacccugaccaacaccagcaucaucaaccacaaguucugcaaccugagcgacgcccacaagaaggaccuguacgaccacgcccugaugagcaucaucagcaccuuccaccugagcauccccaacuucaaccaguacgaggccaugagcugcgacuucaacggcggcaagaucagcgugcaguacaaccugagccacaccuacgccguggacgccgccaaccacugcggcaccaucgccaacggcgugcugcagaccuucaugagaauggccuggggcggcagcuacaucgcccuggacagcggcaagggcagcugggacugcaucaugaccagcuaccaguaccugaucauccagaacaccaccugggaggaccacugccaguucagcagacccagccccaucggcuaccugggccugcugagccagagaaccagagacaucuacaucagcagaagacugcugggcaccuucaccuggacccugagcgacagcgagggcaacgagacccccggcggcuacugccugaccagauggaugcugaucgaggccgagcugaagugcuucggcaacaccgccguggccaagugcaacgagaagcacgacgaggaguucugcgacaugcugagacuguucgacuucaacaagcaggccaucagaagacugaagaccgaggcccagaugagcauccagcugaucaacaaggccgugaacgcccugaucaacgaccagcugaucaugaagaaccaccugagagacaucaugggcauccccuacugcaacuacagcaaguacugguaccugaaccacaccgugaccggcaagaccagccugcccagaugcuggcuggugagcaacggcagcuaccugaacgagacccacuucagcgacgacaucgagcagcaggccgacaacaugaucaccgagcugcugcagaaggaguacauggacagacagggcaagaccccccugggccugguggaccuguucguguucagcaccagcuucuaccugaucagcaucuuccugcaccugaucaagauccccugaggacuaguuauaagacugacuagcccgaugggccucccaacgggcccuccuccccuccuugcaccgagauuaaucaaaggcucuuuucagagccaccaaaaaaaaaaaaaaaaaaaaaaaaaaaaaaaaaaaaaaaaaaaaaaaaaaaaaaaaaaaaaaaaaaaaaaaaaaaaaaaaaaaaaaaaaaaaaaaaaaaaa

SEQ ID NO: 43128 - RNA, 1572 nt, Artificial Sequence
  mRNA product Design i-3 (hSL-A100) comprising derived and/or modified sequence from LASV(LASV253-NIG-2011;Clade II)__AIT17670__GPCmut13 (opt4)
aggagaaagcuuaccaugggccagaucaucaccuucuuccaggaggugccccacgugaucgaggaggugaugaacaucgugcugaucgcccugagccugcuggccauccugaagggcaucuacaacguggccaccugcggccuguucggccuggugagcuuccugcugcugugcggcagaagcugcagcaccaccuacaagggcguguacgagcugcagacccuggagcuggacauggccagccugaacaugaccaugccccugagcugcaccaagaacaacagccaccacuacaucauggugggcaacgagaccggccuggagcugacccugaccaacaccagcaucaucaaccacaaguucugcaaccugagcgacgcccacaagaagaaccuguacgaccacgcccugaugagcaucaucagcaccuuccaccugagcauccccaacuucaaccaguacgaggccaugagcugcgacuucaacggcggcaagaucagcgugcaguacaaccugagccacaccuacgccguggacgccgccaaccacugcggcaccaucgccaacggcgugcugcagaccuucaugagaauggccuggggcggcagcuacaucgcccuggacagcggcaagggcagcugggacugcaucaugaccagcuaccaguaccugaucauccagaacaccaccugggaggaccacugccaguucagcagacccagccccaucggcuaccugggccugcugagccagagaaccagagacaucuacaucagcagaagacugcugggcaccuucaccuggacccugagcgacagcgagggcaacgagacccccggcggcuacugccugaccagauggaugcugaucgaggccgagcugaagugcuucggcaacaccgccguggccaagugcaacgagaagcacgacgaggaguucugcgacaugcugagacuguucgacuucaacaagcaggccaucagaagacugaaggccgaggcccagaugagcauccagcugaucaacaaggccgugaacgcccugaucaacgaccagcugaucaugaagaaccaccugagagacaucaugggcauccccuacugcaacuacagcaaguacugguaccugaaccacaccgugaccggcagaaccagccugcccagaugcuggcuggugagcaacggcagcuaccugaacgagacccacuucagcgacgacaucgagcagcaggccgacaacaugaucaccgagcugcugcagaaggaguacaucgacagacagggcaagaccccccugggccugguggaccuguucguguucagcaccagcuucuaccugaucagcaucuuccugcaccuggugaagauccccugaggacuaguuauaagacugacuagcccgaugggccucccaacgggcccuccuccccuccuugcaccgagauuaaucaaaggcucuuuucagagccaccaaaaaaaaaaaaaaaaaaaaaaaaaaaaaaaaaaaaaaaaaaaaaaaaaaaaaaaaaaaaaaaaaaaaaaaaaaaaaaaaaaaaaaaaaaaaaaaaaaaaa

SEQ ID NO: 43129 - RNA, 1572 nt, Artificial Sequence
  mRNA product Design i-3 (hSL-A100) comprising derived and/or modified sequence from LASV(LASV254-NIG-2011;Clade II)__AIT17674__GPCmut13 (opt4)
aggagaaagcuuaccaugggccagaucaucaccuucuuccaggaggugccccacgugaucgaggaggugaugaacaucgugcugaucgcccugagccugcuggccauccugaagggcaucuacaacguggccaccugcggccuguucggccuggugagcuuccugcugcugugcggcagaagcugcagcaccaccuacaagggcguguacgagcugcagacccuggagcuggacaugaccaaccugaacaugaccaugccccugagcugcaccaagaacaacagccaccacuacaucauggugggcaacgagaccggccuggagcugacccugaccaacaccagcaucaucaaccacaaguucugcaaccugagcgacgcccacaagaagaaccuguacaaccacgcccugaugagcaucaucagcaccuuccaccugagcauccccaacuucaaccaguacgaggccaugagcugcgacuucaacggcggcaagaucagcgugcaguacaaccugagccacagcuacgccguggacgccgccaaccacugcggcaccaucgccaacggcgugcugcagaccuucaugagaauggccuggggcggcagcuacaucgcccuggacagcggcaagggcaacugggacugcaucaugaccagcuaccaguaccugaucauccagaacaccaccugggaggaccacugccaguucagcagacccagccccaucggcuaccugggccugcugagccagagaaccagagacaucuacaucagcagaagacugcugggcaccuucaccuggacccugagcgacagcgagggcaacgagacccccggcggcuacugccugaccagauggaugcugaucgaggccgagcugaagugcuucggcaacaccgccguggccaagugcaacgagaagcacgacgaggaguucugcgacaugcugagacuguucgacuucaacaagcaggccaucagaagacugaagaccgaggcccaggccaacauccagcugaucaacaaggccgugaacgcccugaucaacgaccagcugaucaugaagaaccaccugagagacaucaugggcauccccuacugcaacuacagcaaguacugguaccugaaccacaccgugaccggcaagaccagccugcccagaugcuggcuggugagcaacggcagcuaccugaacgagacccacuucagcgacgacaucgagcagcaggccgacaacaugaucaccgagcugcugcagaaggaguacauggacagacagggcaagaccccccugggccugguggaccuguucguguucagcaccagcuucuaccugaucagcaucuuccugcaccuggugaagauccccugaggacuaguuauaagacugacuagcccgaugggccucccaacgggcccuccuccccuccuugcaccgagauuaaucaaaggcucuuuucagagccaccaaaaaaaaaaaaaaaaaaaaaaaaaaaaaaaaaaaaaaaaaaaaaaaaaaaaaaaaaaaaaaaaaaaaaaaaaaaaaaaaaaaaaaaaaaaaaaaaaaaaa

SEQ ID NO: 43130 - RNA, 1572 nt, Artificial Sequence
  mRNA product Design i-3 (hSL-A100) comprising derived and/or modified sequence from LASV(Nig08-A19;Clade III)__ADU56618__GPCmut13 (opt4)
aggagaaagcuuaccaugggccagaucgugaccuucuuccaggaggugccccacgugaucgaggaggugaugaacaucgugcugaucgcccugagcauccuggccauccugaagggccuguacaacaucgccaccugcggccugaucggccuggugaccuuccugcugcugagcggcagaagcugcagcaugaccuacaagggcguguacgagcugcagacccuggagcugaacaugaacacccugaacaugaccaugccccugagcugcaccaagaacaacagccaccacuacaucauggugggcaacgagaccggccuggagcugacccugaccaacaccagccugcugcaccacaaguucugcaaccugagcgacgcccacaagaagaaccuguacgaccacacccugaugagcaucaucagcaccuuccaccugagcauccccaacuucaaccaguacgaggccaugagcugcgacuucaacggcggcaagaucaccgugcaguacaaccugagccacagcuacgccaucgacgccgccaaccacugcggcaccguggccaacggcgugcugcagaccuucaugagaauggccuggggcggcagcuacaucgcccuggacagcggcagaggcaagugggacugcaucaugaccagcuaccaguaccugaucauccagaacaccaccugggaggaccacugccaguucagcagacccagccccaucggcuaccugggccugcugagccagagaaccagagacaucuacaucagcagaagacugcugggcaccuucaccuggacccugagcgacagcgagggcaacgagacccccggcggcuacugccugaccagauggaugcugaucgaggccgagcugaagugcuucggcaacaccgccguggccaagugcaacgagaagcacgacgaggaguucugcgacaugcugagacuguucgacuucaacaagcaggccaucagaagacugaaggccgaggcccagaugagcauccagcugaucaacaaggccgugaacgcccugaucaacgaccagcugaucaugaagaaccaccugagagacaucaugggcauccccuacugcaacuacagcaaguacugguaccugaaccacaccagcaccggcagaaccagccugcccagaugcuggcuggugagcaacggcagcuaccugaacgagacccacuucagcgacgacaucgagcagcaggccgacaacaugaucaccgagaugcugcagaaggaguaccuggacagacagggcaagaccccccugggccugguggaccuguucguguucagcaccagcuucuaccugaucagcaucuuccugcaccuggugaagauccccugaggacuaguuauaagacugacuagcccgaugggccucccaacgggcccuccuccccuccuugcaccgagauuaaucaaaggcucuuuucagagccaccaaaaaaaaaaaaaaaaaaaaaaaaaaaaaaaaaaaaaaaaaaaaaaaaaaaaaaaaaaaaaaaaaaaaaaaaaaaaaaaaaaaaaaaaaaaaaaaaaaaaa

SEQ ID NO: 43131 - RNA, 1575 nt, Artificial Sequence
  mRNA product Design i-3 (hSL-A100) comprising derived and/or modified sequence from LASV(G1180-SLE-2010;Clade IV)__AIT17168__GPCmut13 (opt4)
aggagaaagcuuaccaugggccagaucgugaccuucuuccaggaggugccccacgugaucgaggaggugaugaacaucgugcugaucgcccugagcauccuggccgugcugaagggccuguacaacuucgccaccugcggccuggugggccugcugaccuuccugcugcugugcggcagaagcugcaccgccagcagauacaagggcguguacgagcugcagacccuggagcugaacauggagacccugaacaugaccaugccccugagcugcaccaagaacaacagccaccacuacaucauggugggcaacgagaccggccuggagcugacccugaccaacaccagcaucaucaaccacaaguucugcaaccugagcgacgcccacaagaagaaccuguacgaccacgcccugaugagcaucaucagcaccuuccaccugagcauccccaacuucaaccaguacgaggccaugagcugcgacuucaacggcggcaagaucagcgugcaguacaaccugagccacagcuacgccggcgacgccgccaaccacugcggcaccguggccaacggcgugcugcagaccuucaugagaauggccuggggcggcagcuacaucgcccuggacagcggccacggcagcugggacugcaucaugaccagcuaccaguaccugaucauccagaacaccaccugggaggaccacugccaguucagcagacccagccccaucggcuaccugggccugcugagccagagaaccagagacaucuacaucagcagaagacugcugggcaccuucaccuggacccugagcgacagcgagggcaaggacacccccggcggcuacugccugaccagauggaugcugaucgaggccgagcugaagugcuucggcaacaccgccguggccaagugcaacgagaagcacgacgaggaguucugcgacaugcugagacuguucgacuucaacaagcaggccauccagagacugaaggccgaggcccagaugagcauccagcugaucaacaaggccgugaacgcccugaucaacgaccagcugaucaugaagaaccaccugagagacaucaugggcauccccuacugcaacuacagcaaguacugguaccugaaccacaccaccaccggcaagaccagccugcccaagugcuggcuggugagcaacggcagcuaccugaacgagacccacuucagcgacgacaucgagcagcaggccgacaacaugaucaccgagaugcugcagaaggaguacauggagagacagggcaagaccccccugggccugguggaccuguucguguucagcaccagcuucuaccugaucagcaucuuccugcaccuggugaagauccccugaggacuaguuauaagacugacuagcccgaugggccucccaacgggcccuccuccccuccuugcaccgagauuaaucaaaggcucuuuucagagccaccaaaaaaaaaaaaaaaaaaaaaaaaaaaaaaaaaaaaaaaaaaaaaaaaaaaaaaaaaaaaaaaaaaaaaaaaaaaaaaaaaaaaaaaaaaaaaaaaaaaaa

SEQ ID NO: 43132 - RNA, 1575 nt, Artificial Sequence
  mRNA product Design i-3 (hSL-A100) comprising derived and/or modified sequence from LASV(G1442-SLE-2011;Clade IV)__AIT17180__GPCmut13 (opt4)
aggagaaagcuuaccaugggccagaucgugaccuucuuccaggaggugccccacgugaucgaggaggugaugaacaucgugcugaucgcccugagcauccuggccgugcugaagggccuguacaacguggccaccugcggccugaucggccuggugaccuuccugcugcugugcggcagaagcugcaccaccacccuguacaagggcguguacgagcugcagacccuggagcugaacauggagacccugaacaugaccaugccccugagcugcaccaagaacaacagccaccacuacaucagagugggcaacgagaccggccuggagcugacccugaccaacaccagcaucaucaaccacaaguucugcaaccugagcgacgcccacaagaagaaccuguacgaccacgcccugaugagcaucaucagcaccuuccaccugagcauccccaacuucaaccaguacgaggccaugagcugcgacuucaacggcggcaagaucagcgugcaguacaaccugagccacagcuacgccggcgacgccgccaaccacugcggcaccguggccaacggcgugcugcagaccuucaugagaauggccuggggcggcagcuacaucgcccuggacagcggcagaggcaacugggacugcaucaugaccagcuaccaguaccugaucauccagaacaccaccugggacgaccacugccaguucagcagacccagccccaucggcuaccugggccugcugagccagagaaccagagacguguacaucagcagaagacugcugggcaccuucaccuggacccugagcgacagcgagggcaaggacacccccggcggcuacugccugaccagauggaugcugaucgaggccgagcugaagugcuucggcaacaccgccguggccaagugcaacgagaagcacgacgaggaguucugcgacaugcugagacuguucgacuucaacaagcaggccauccagagacugaaggccgaggcccagaugagcauccagcugaucaacaaggccgugaacgcccugaucaacgaccagcugaucaugaagaaccaccugagagacaucaugggcauccccuacugcaacuacagcaaguacugguaccugaacaacaccgccaccggcaagaccagccugcccaagugcuggcugaucagcaacggcagcuaccugaacgagacccacuucagcgacgacaucgagcaggaggccgacaacaugaucaccgagaugcugcagaaggaguacauggagagacagggcaagaccccccugggccugguggaccuguucguguucagcaccagcuucuaccugaucagcaucuuccugcaccuggugaagauccccugaggacuaguuauaagacugacuagcccgaugggccucccaacgggcccuccuccccuccuugcaccgagauuaaucaaaggcucuuuucagagccaccaaaaaaaaaaaaaaaaaaaaaaaaaaaaaaaaaaaaaaaaaaaaaaaaaaaaaaaaaaaaaaaaaaaaaaaaaaaaaaaaaaaaaaaaaaaaaaaaaaaaa

SEQ ID NO: 43133 - RNA, 1575 nt, Artificial Sequence
  mRNA product Design i-3 (hSL-A100) comprising derived and/or modified sequence from LASV(G3010-SLE-2013;Clade IV)__AIT17344__GPCmut13 (opt4)
aggagaaagcuuaccaugggccagaucgugaccuucuuccaggaggugccccacgugaucgaggaggugaugaacaucgugcugaucgcccugagcauccuggccgugcugaagggccuguacaacuucgccaccugcggccuggugggccuggugaccuuccugcugcugugcggcagaagcugcaccaccagccuguacaagggcguguacgagcugcagacccuggagcugaacauggagacccugaacaugaccaugccccugagcugcaccaagaacaacagccaccacuacaucauggugggcaacgagaccggccuggagcugacccugaccaacaccagcaucaucaaccacaaguucugcaaccugagcgacgcccacaagaagaaccuguacaaccacgcccugaugagcaucaucagcaccuuccaccugagcauccccaacuucaaccaguacgaggccaugagcugcgacuucaacggcggcaagaucagcgugcaguacaaccugagccacagcuacgccggcgacgccgccagccacugcggcaccguggccaacggcgugcugcagaccuucaugagaauggccuggggcggcagcuacaucgcccuggacagcggcuacggcaagugggacugcaucaugaccagcuaccaguaccugaucauccagaacaccaccugggaggaccacugccaguucagcagacccagccccaucggcuaccugggccugcugagccagagaaccagagacaucuacaucagcagaagacugcugggcaccuucaccuggacccugagcgacagcgagggcaaggacacccccggcggcuacugccugaccagauggaugcugaucgaggccgagcugaagugcuucggcaacaccgccguggccaagugcaacgagaagcacgacgaggaguucugcgacaugcugagacuguucgacuucaacaagcaggccauccagagacugaagaccgaggcccagaugagcauccagcugaucaacaaggccgugaacgcccugaucaacgaccagcugaucaugaagaaccaccugagagacaucaugggcauccccuacugcaacuacagcaaguacugguaccugaaccacaccaccaccggcaagaccagccugcccaagugcuggcuggugagcaacggcagcuaccugaacgagacccacuucagcgacgacaucgagcagcaggccgacaacaugaucaccgagaugcugcagaaggaguacauggagagacagggcaagaccccccugggccugguggaccuguucguguucagcaccagcuucuaccugaucagcaucuuccugcaccuggugaagauccccugaggacuaguuauaagacugacuagcccgaugggccucccaacgggcccuccuccccuccuugcaccgagauuaaucaaaggcucuuuucagagccaccaaaaaaaaaaaaaaaaaaaaaaaaaaaaaaaaaaaaaaaaaaaaaaaaaaaaaaaaaaaaaaaaaaaaaaaaaaaaaaaaaaaaaaaaaaaaaaaaaaaaa

SEQ ID NO: 43134 - RNA, 1575 nt, Artificial Sequence
  mRNA product Design i-3 (hSL-A100) comprising derived and/or modified sequence from LASV(G502-SLE-2009;Clade IV)__AIT17126__GPCmut13 (opt4)
aggagaaagcuuaccaugggccagaucgugaccuucuuccaggaggugccccacgugaucgaggaggugaugaacaucgugcugaucgcccugagcauccuggccgugcugaagggccuguacaacuucgccaccugcggccuggugggccugcugaccuuccugcugcugugcggcagaagcugcaccaccggccuguacaagggcguguacgagcugcagacccuggagcugaacauggagacccugaacaugaccaugccccugagcugcaccaagaacaacagccaccacuacaucauggugggcaacgagaccggccuggagcugacccugaccaacaccagcaucaucaaccacaaguucugcaaccugagcgacgcccacaagaagaaccuguacgaccacgcccugaugagcaucaucagcaccuuccaccugagcauccccaacuucaaccaguacgaggccaugagcugcgacuucaacggcggcaagaucagcgugcaguacaaccugagccacagcuacgccggcgacgccgccgaccacugcggcaccguggccaacggcgugcugcagaccuucaugagaauggccuggggcggcagcuacaucgcccuggacagcggcagaggcagaugggacugcaucaugaccagcuaccaguaccugaucauccagaacaccaccugggaggaccacugccaguucagcagacccagccccaucggcuaccugggccugcugagccagagaaccagagacaucuacaucagcagaagacugcugggcaccuucaccuggacccugagcgacagcgagggcaaggacacccccggcggcuacugccugaccagauggaugcugaucgaggccgagcugaagugcuucggcaacaccgccguggccaagugcaacgagaagcacgacgaggaguucugcgacaugcugagacuguucgacuucaacaagcaggccauccagagacugaaggccgaggcccagaugagcauccagcugaucaacaaggccgugaacgcccugaucaacgaccagcuggugaugaagaaccaccugagagacaucaugggcauccccuacugcaacuacagcagauacugguaccugaaccacaccaccaccggcagaaccagccugcccaagugcuggcuggugagcaacggcagcuaccugaacgagacccacuucagcgacgacaucgagcagcaggccgacaacaugaucaccgagaugcugcagaaggaguacauggagagacagggcaagaccccccugggccugguggaccuguucguguucagcaccagcuucuaccugaucagcaucuuccugcaccuggugaagauccccugaggacuaguuauaagacugacuagcccgaugggccucccaacgggcccuccuccccuccuugcaccgagauuaaucaaaggcucuuuucagagccaccaaaaaaaaaaaaaaaaaaaaaaaaaaaaaaaaaaaaaaaaaaaaaaaaaaaaaaaaaaaaaaaaaaaaaaaaaaaaaaaaaaaaaaaaaaaaaaaaaaaaa

SEQ ID NO: 43135 - RNA, 1575 nt, Artificial Sequence
  mRNA product Design i-3 (hSL-A100) comprising derived and/or modified sequence from LASV(G733-SLE-2010;Clade IV)__AIT17154__GPCmut13 (opt4)
aggagaaagcuuaccaugggccagaucgugaccuucuuccaggaggugccccacgugaucgaggaggugaugaacaucgugcugaucgcccugagcauccuggccgugcugaagggccuguacaacuucgccaccugcggcaucgugggccuggugagcuuccugcugcugugcggcagaagcugcaccaccagccuguacaagggcguguacgagcugcagacccuggagcugaacauggagacccugaacaugaccaugccccugagcugcaccaagaacaacagccaccacuacaucauggugggcaacgagaccggccuggagcugacccugaccaacaccagcaucaucaaccacaaguucugcaaccugagcgacgcccacaagaagaaccuguacgaccacgcccugaugagcaucaucagcaccuuccaccugagcauccccaacuucaaccaguacgaggccaugagcugcgacuucaacggcggcaagaucagcgugcaguacaaccugagccacagcuacgccggcgacgccgccaaccacugcggcaccaucgccaacggcgugcugcagaccuucaugagaauggccuggggcggcagcuacaucgcccuggacagcggcagagacagaugggacugcaucaugaccagcuaccaguaccugaucauccagaacaccaccugggaggaccacugccaguucagcagacccagccccaucggcuaccugggccugcugagccagagaaccagagacaucuacaucagcagaagacugcugggcaccuucaccuggacccugagcgacagcgagggcaaggacacccccggcggcuacugccugaccagauggaugcugaucgaggccgagcugaagugcuucggcaacaccgccguggccaagugcaacgagaagcacgacgaggaguucugcgacaugcugagacuguucgacuucaacaagcaggccauccagagacugaaggccgaggcccagaugagcauccagcugaucaacaaggccgugaacgcccugaucaacgaccagcugaucaugaagaaccaccugagagacaucaugggcauccccuacugcaacuacagcaaguacugguaccugaaccacaccaccaccggcaagaccagccugcccaagugcuggcuggugagcaacggcagcuaccugaacgagacccacuucagcgacgacaucgagcagcaggccgacaacaugaucaccgagaugcugcagaaggaguacauggagagacagggcaagaccccccugggccugguggaccuguucguguucagcaccagcuucuaccugaucagcaucuuccugcaccuggugaagauccccugaggacuaguuauaagacugacuagcccgaugggccucccaacgggcccuccuccccuccuugcaccgagauuaaucaaaggcucuuuucagagccaccaaaaaaaaaaaaaaaaaaaaaaaaaaaaaaaaaaaaaaaaaaaaaaaaaaaaaaaaaaaaaaaaaaaaaaaaaaaaaaaaaaaaaaaaaaaaaaaaaaaaa

SEQ ID NO: 43136 - RNA, 1575 nt, Artificial Sequence
  mRNA product Design i-3 (hSL-A100) comprising derived and/or modified sequence from MOPV/LASV reassortant(IGS-1;Clade IV)__AFY05576__GPCmut13 (opt4)
aggagaaagcuuaccaugggccagaucgugaccuucuuccaggaggugccccacgugaucgaggaggugaugaacaucgugcugaucgcccugagcgugcuggccgugcugaagggccuguacaacuucgccaccugcggccuggugggccuggugaccuuccugcugcugugcggcagaagcugcaccaccagccuguacaagggcguguacgagcugcagacccuggagcugaacauggagacccugaacaugaccaugccccugagcugcaccaagaacaacagccaccacuacaucauggugggcaacgagaccggccuggagcugacccugaccaacaccagcaucaucaaccacaaguucugcaaccugagcgacgcccacaagaagaaccuguacgaccacgcccugaugagcaucaucagcaccuuccaccugagcauccccaacuucaaccaguacgaggccaugagcugcgacuucaacggcggcaagaucagcgugcaguacaaccugagccacagcuacgccggcgacgccgccaaccacugcggcaccguggccaacggcgugcugcagaccuucaugagaauggccuggggcggcagcuacaucgcccuggacagcggcagaggcaacugggacugcaucaugaccagcuaccaguaccugaucauccagaacaccaccugggaggaccacugccaguucagcagacccagccccaucggcuaccugggccugcugagccagagaaccagagacaucuacaucagcagaagacugcugggcaccuucaccuggacccugagcgacagcgagggcgaggacacccccggcggcuacugccugaccagauggaugcugaucgaggccgagcugaagugcuucggcaacaccgccguggccaagugcaacgagaagcacgacgaggaguucugcgacaugcugagacuguucgacuucaacaagcaggccauccagagacugaaggccgaggcccagaugagcauccagcugaucaacaaggccgugaacgcccugaucaacgaccagcugaucaugaagaaccaccugagagacaucaugggcauccccuacugcaacuacagcaaguacugguaccugaaccacaccaccaccggcagaaccagccugcccaagugcuggcuggugagcaacggcagcuaccugaacgagacccacuucagcgacgacaucgagcagcaggccgacaacaugaucaccgagaugcugcagaaggaguacauggagagacagggcaagaccccccugggccugguggaccuguucguguucagcaccagcuucuaccugaucagcaucuuccugcaccuggugaagauccccugaggacuaguuauaagacugacuagcccgaugggccucccaacgggcccuccuccccuccuugcaccgagauuaaucaaaggcucuuuucagagccaccaaaaaaaaaaaaaaaaaaaaaaaaaaaaaaaaaaaaaaaaaaaaaaaaaaaaaaaaaaaaaaaaaaaaaaaaaaaaaaaaaaaaaaaaaaaaaaaaaaaaa

SEQ ID NO: 43137 - RNA, 1575 nt, Artificial Sequence
  mRNA product Design i-3 (hSL-A100) comprising derived and/or modified sequence from LASV(LM765-SLE-2012;Clade IV)__AIT17814__GPCmut13 (opt4)
aggagaaagcuuaccaugggccagaucgugaccuucuuccaggaggugccccacgugaucgaggaggugaugaacaucgugcugaucgcccugagcauccuggccgugcugaagggccuguacaacuucgccaccugcggccuggugggccuggugaccuuccugcugcugugcggcagaagcugcaccaccagccuguacaagggcguguacgagcugcagacccuggagcugaacauggagacccugaacaugaccaugccccugagcugcaccaagaacaacagccaccacuacaucauggugggcaacgagaccggccuggagcugacccugaccaacaccagcaucaucgaccacaaguucugcaaccugagcgacgcccacagaaagaaccuguacgaccacgcccugaugagcaucaucagcaccuuccaccugagcauccccaacuucaaccaguacgaggccaugagcugcgacuucaacggcggcaagaucagcgugcaguacaaccugagccacagcuacgccaaggacgccgccgaccacugcggcaccguggccaacggcgugcugcagaccuucaugagaauggccuggggcggcagcuacaucgcccuggacagcggcagaggcagaugggacugcaucaugaccagcuaccaguaccugaucauccagaacaccaccugggaggaccacugccaguucagcagacccagccccaucggcuaccugggccugcugagccagagaaccagagacaucuacaucagcagaagacugcugggcaccuucaccuggacccugagcgacagcgagggcaaggacacccccggcggcuacugccugaccagauggaugcugaucgaggccgagcugaagugcuucggcaacaccgccguggccaagugcaacgagaagcacgacgaggaguucugcgacaugcugagacuguucgacuucaacaagcaggccauccagagacugaaggccgaggcccagaugagcauccagcugaucaacaaggccgugaacgcccugaucaacgaccagcugaucaugaagaaccaccugagagacaucaugggcauccccuacugcaacuacagcaaguacugguaccugaaccacaccaccaccggcaagaccagccugcccaagugcuggcuggugagcaacggcagcuaccugaacgagacccacuucagcgacgacaucgagcagcaggccgacaacaugaucaccgagaugcugcagaaggaguacauggagagacagggcaagaccccccugggccugguggaccuguucguguucagcaccagcuucuaccugaucagcaucuuccugcaccuggugaagauccccugaggacuaguuauaagacugacuagcccgaugggccucccaacgggcccuccuccccuccuugcaccgagauuaaucaaaggcucuuuucagagccaccaaaaaaaaaaaaaaaaaaaaaaaaaaaaaaaaaaaaaaaaaaaaaaaaaaaaaaaaaaaaaaaaaaaaaaaaaaaaaaaaaaaaaaaaaaaaaaaaaaaaa

SEQ ID NO: 43138 - RNA, 1575 nt, Artificial Sequence
  mRNA product Design i-3 (hSL-A100) comprising derived and/or modified sequence from LASV(LM776-SLE-2012;Clade IV)__AIT17824__GPCmut13 (opt4)
aggagaaagcuuaccaugggccagaucgugaccuucuuccaggaggugccccacgugaucgaggaggugaugaacaucgugcugaucgcccugagcauccuggccgugcugaagggccuguacaacuucgccaccugcggccuggugggccuggugaccuuccugcugcugugcggcagaagcugcaccaccagcguguacaagggcguguacgagcugcagacccuggagcugaacauggagacccugaacaugaccaugccccugagcugcaccaagaacaacagccaccacuacaucauggugggcaacgagaccggccuggagcugacccugaccaacaccagcaucaucaaccacaaguucugcaaccugagcgacgcccacaagaagaaccuguacgaccacgcccugaugagcaucaucagcaccuuccaccugagcauccccaacuucaaccaguacgaggccaugagcugcgacuucaacggcggcaagaucagcgugcaguacaaccugagccacagcuacgccggcgacgccgccaaccacugcggcaccguggccaacggcgugcugcagaccuucaugagaauggccuggggcggcagcuacaucgcccuggacagcggccacggcaagugggacugcaucaugaccagcuaccaguaccugaucauccagaacaccaccugggaggaccacugccaguucagcagacccagccccaucggcuaccugggccugcugagccagagaaccagagacaucuacaucagcagaagacugcugggcaccuucaccuggacccugagcgacagcgagggcaaggacacccccggcggcuacugccugaccagauggaugcugaucgaggccgagcugaagugcuucggcaacaccgccguggccaagugcaacgagaagcacgacgaggaguucugcgacaugcugagacuguucgacuucaacaagcaggccauccagagacugaaggccgaggcccagaugagcauccagcugaucaacaaggccgugaacgcccugaucaacgaccagcugaucaugaagaaccaccugagagacaucaugggcauccccuacugcaacuacagcaaguacugguaccugaaccacaccaccaccggcaagaccagccugcccaagugcuggcuggugagcaacggcagcuaccugaacgagacccacuucagcgacgacaucgagcagcaggccgacaacaugaucaccgagaugcugcagaaggaguacauggagagacagggcaagaccccccugggccugguggaccuguucguguucagcaccagcuucuaccugaucagcaucuuccugcaccuggugaagauccccugaggacuaguuauaagacugacuagcccgaugggccucccaacgggcccuccuccccuccuugcaccgagauuaaucaaaggcucuuuucagagccaccaaaaaaaaaaaaaaaaaaaaaaaaaaaaaaaaaaaaaaaaaaaaaaaaaaaaaaaaaaaaaaaaaaaaaaaaaaaaaaaaaaaaaaaaaaaaaaaaaaaaa

SEQ ID NO: 43139 - RNA, 1575 nt, Artificial Sequence
  mRNA product Design i-3 (hSL-A100) comprising derived and/or modified sequence from LASV(Mad39;Clade IV)__ANH09722__GPCmut13 (opt4)
aggagaaagcuuaccaugggccagaucgugaccuucuuccaggaggugccccacgugaucgaggaggugaugaacaucgugcugaucgcccugagcauccuggccgugcugaagggccuguacaacguggccaccugcggccugaucggccuggugaccuuccugcugcugugcggcagaagcugcaccaccacccuguacaagggcguguacgagcugcaggcccuggagcugaacauggagacccugaacaugaccaugccccugagcugcaccaagaacaacagccaccacuacaucagagugggcaacgagaccggccuggagcugacccugaccaacaccagccugaucaaccacaaguucugcaaccugagcgacgcccacaagaagaaccuguacgaccacgcccugaugagcaucaucagcaccuuccaccugagcauccccaacuucaaccaguacgaggccaugagcugcgacuucaacgacggcaagaucagcgugcaguacaaccugagccacaccuacgccggcgacaccgccaaccacugcggcaccguggccaacggcgugcugcagaccuucaugagaauggccuggggcggcagcuacaucgcccuggacagcggcagaggcggcugggacugcaucaugaccagcuaccaguaccugaucauccagaacaccaccugggaggaccacugccaguucagcagacccagccccaucggcuaccugggccugcugagccagagaaccagagacaucuacaucagcagaagacugcugggcaccuucaccuggacccugagcgacagcgagggcaaggacacccccggcggcuacugccugaccagauggaugcugaucgaggccgagcugaagugcuucggcaacaccgccguggccaagugcaacgagaagcacgacgaggaguucugcgacaugcugagacuguucgacuucaacaagcaggccauccagagacugaaggccgaggcccagaugagcauccagcugaucaacaaggccgugaacgcccugaucaacgaccagcugaucaugaagaaccaccugagagacaucaugggcauccccuacugcaacuacagcaaguacugguaccugaaccacaccgugaccggcaagaccagccugcccaagugcuggcuggugagcaacggcagcuaccugaacgagacccacuucagcgacgacaucgagcagcaggccgacaacaugaucaccgagaugcugcagaaggaguacauggagagacagggcaagaccccccugggccugguggaccuguucguguucagcaccagcuucuaccugaucagcaucuuccugcaccuggugaagauccccugaggacuaguuauaagacugacuagcccgaugggccucccaacgggcccuccuccccuccuugcaccgagauuaaucaaaggcucuuuucagagccaccaaaaaaaaaaaaaaaaaaaaaaaaaaaaaaaaaaaaaaaaaaaaaaaaaaaaaaaaaaaaaaaaaaaaaaaaaaaaaaaaaaaaaaaaaaaaaaaaaaaaa

SEQ ID NO: 43140 - RNA, 1575 nt, Artificial Sequence
  mRNA product Design i-3 (hSL-A100) comprising derived and/or modified sequence from LASV(Z0947-SLE-2011;Clade IV)__AIT17840__GPCmut13 (opt4)
aggagaaagcuuaccaugggccagaucgugaccuucuuccaggaggugccccacgugaucgaggaggugaugaacaucgugcugaucgcccugagcauccuggccgugcugaagggccuguacaacuucgccaccugcggccuggugggccuggugaccuuccugcugcugugcggcagaagcugcaccaucagccuguacaagggcguguacgagcugcagacccuggagcugaacauggagacccugaacaugaccaugccccugagcugcaccaagaacaacagccaccacuacaucauggugggcaacgagaccggccuggagcugacccugaccaacaccagcaucaucaaccacaaguucugcaaccugagcgacgcccacaagaagaaccuguacgaccacgcccugaugagcaucaucagcaccuuccaccugagcauccccaacuucaaccaguacgaggccaugagcugcgacuucaacggcggcaagaucagcgugcaguacaaccugagccacagcuacgccggcgacgccgccaaccacugcggcaccguggccaacggcgugcugcagaccuucaugagaauggccuggggcggcagcuacaucgcccuggacagcggcagagacagaugggacugcaucaugaccagcuaccaguaccugaucauccagaacaccaccugggaggaccacugccaguucagcagacccagccccaucggcuaccugggccugcugagccagagaaccagagacaucuacaucagcagaagacugcugggcaccuucaccuggacccugagcgacagcgagggcaaggacacccccggcggcuacugccugaccagauggaugcugaucgaggccgagcugaagugcuucggcaacaccgccguggccaagugcaacgagaagcacgacgaggaguucugcgacaugcugagacuguucgacuucaacaagcaggccauccagagacugaaggccgaggcccagaugagcauccagcugaucaacaaggccgugaacgcccugaucaacgaccagcugaucaugaagaaccaccugagagacaucaugggcauccccuacugcaacuacagcaaguacugguaccugaaccacaccaccaccggcaagaccagccugcccaagugcuggcuggugagcaacggcagcuaccugaacgagacccacuucagcgacgacaucgagcagcaggccgacaacaugaucaccgagaugcugcagaaggaguacauggagagacagggcaagaccccccugggccugguggaccuguucguguucagcaccagcuucuaccugaucagcaucuuccugcaccuggugaagauccccugaggacuaguuauaagacugacuagcccgaugggccucccaacgggcccuccuccccuccuugcaccgagauuaaucaaaggcucuuuucagagccaccaaaaaaaaaaaaaaaaaaaaaaaaaaaaaaaaaaaaaaaaaaaaaaaaaaaaaaaaaaaaaaaaaaaaaaaaaaaaaaaaaaaaaaaaaaaaaaaaaaaaa

SEQ ID NO: 43141 - RNA, 1575 nt, Artificial Sequence
  mRNA product Design i-3 (hSL-A100) comprising derived and/or modified sequence from LASV(Josiah;Clade IV)__NP_694870__GPCmut13 (opt5)
aggagaaagcuuaccaugggccagaucgugaccuucuuucaagaggucccccacguuauugaagaggugaugaacaucgugcugauugcccucagcguccuggcugugcuuaaggggcuguacaauuucgccacaugcggacucguuggccuggugacguuucuucugcucugugggagauccugcaccacaucucuguauaaaggagucuacgaacugcagacccucgagcugaacauggaaacacuuaauaugaccaugccucugagcuguacaaagaacaauucccaucacuauaucauggugggcaacgagaccgggcucgagcugacgcuuaccaauacaucuauuaucaaccauaaauucugcaaucugagcgacgcgcacaagaaaaaccucuacgaucaugcucugauguccaucauuucuaccuuucaccugagcaucccgaauuucaaccaguaugaagccauguccugugacuuuaauggaggcaagauuagcguucaguacaaccucucucacuccuaugccggcgaugcugccaaucauugcgggacaguggcuaacggaguccugcaaaccuucaugcggauggccuggggcgggagcuacaucgcgcuugacucuggacgcggcaacugggauuguauuaugacguccuaccaguaucugaucauucagaauacaaccugggaggaccacugccaguuuagcagacccucuccuaucggguaccucggacugcuuucccaacggacacgcgauaucuauauuagcagacggcugcucggcaccuucaccuggacacuguccgacucugaaggcaaggauacgcccgggggauacugucugacccgcuggaugcucaucgaggccgagcugaaaugcuuuggcaacacagcuguggccaaguguaaugaaaaacaugacgaggaguucugcgauaugcuuagacuguuugacuucaacaagcaggcuauucagcggcucaaagccgaagcgcagaugagcauccaacugauuaauaaggccgugaacgcucuuaucaaugaucagcugaucaugaagaaccaccuccgcgacauuauggggaucccuuauugcaauuacuccaaauauugguaccugaaccacaccacaaccggaagaacgagccugcccaaguguuggcucgucucuaauggcuccuaccugaacgaaacacauuucagcgacgauauugagcagcaagccgacaauaugaucaccgagaugcuucagaaagaauauauggagcggcaggggaagaccccucugggacucguugaucuguuuguguucucuaccagcuuuuaccugauuuccaucuuccuucaccucgugaaaaucccgugaggacuaguuauaagacugacuagcccgaugggccucccaacgggcccuccuccccuccuugcaccgagauuaaucaaaggcucuuuucagagccaccaaaaaaaaaaaaaaaaaaaaaaaaaaaaaaaaaaaaaaaaaaaaaaaaaaaaaaaaaaaaaaaaaaaaaaaaaaaaaaaaaaaaaaaaaaaaaaaaaaaaa

SEQ ID NO: 43142 - RNA, 1572 nt, Artificial Sequence
  mRNA product Design i-3 (hSL-A100) comprising derived and/or modified sequence from LASV(LP;Clade I)__AAF86701__GPCmut13 (opt5)
aggagaaagcuuaccaugggccagaucauuaccuucuuucaagaggugccccacgucaucgaagagguuaugaacauugugcugaucgcccucagccugcuugcuauucugaaggggcucuacaauaucgccacaugcggaaucauuggccugguggcguuccuuuuucugugugggaaauccugcucucucacgcugaagggaggcuaugaacugcagacccucgagcugaacauggaaacacuuaauaugaccaugccucugagcuguaccaaaaacuccucucaucacuacaucagagucgggaaugagacaggacucgagcugacacuuaccaacacgagcauuaucaaucauaaguucugcaaccuguccgacgcucacaaaaagaaucucuaugaucaugcccugaugucuauuaucagcaccuuucaccuguccauuccgaacuucaaucaguacgaagccaugagcugugacuuuaacggcggcaagaucucugugcaguauaaucucucccacagcuacgcuggggaugccgcugagcauugcggaacaguugccaacggcgugcugcaaaccuucaugcggauggcguggggagggcgcuauaucgcccuugacucuggcaaagggaauugggauuguauuaugacauccuaccaguaccugaucauucagaacaccacgugggaagaccacugccaguuuagcagacccucuccuaucggauaucucggccugcuuucccaacggacacgcgauauuuacaucagcagacggcugcucggcaccuucacauggacccuguccgacucugaggggaacgagacccccggaggcuauugucugacacgcuggaugcucaucgaagcugagcugaagugcuuugggaauacggccgucgcuaaauguaacgaaaagcaugaugaggaguucugcgacaugcuuagacuguuugauuucaauaaacaggccauucggcgccucaaggcggaagcccagaugagcauccagcugauuaacaaggcugugaaugcccuuaucaacgaccaacugauuaugaaaaaucaccucagagauaucaugggaaucccuuacugcaacuauuccaaguacugguaucugaaucacaccagcucuggccggacaucccugcccaaauguuggcucauuagcaacgggucuuaccugaaugagacccaguucagcgacgacaucgaacagcaagcugauaacaugauuacagagaugcuucagaaggaauacaucgagcgccagggaaaaaccccucugggccucguugacauuuuuaucuucuccacgucuuuuuaucugauuagcaucuuccugcaucuuaucaagauuccgugaggacuaguuauaagacugacuagcccgaugggccucccaacgggcccuccuccccuccuugcaccgagauuaaucaaaggcucuuuucagagccaccaaaaaaaaaaaaaaaaaaaaaaaaaaaaaaaaaaaaaaaaaaaaaaaaaaaaaaaaaaaaaaaaaaaaaaaaaaaaaaaaaaaaaaaaaaaaaaaaaaaaa

SEQ ID NO: 43143 - RNA, 1572 nt, Artificial Sequence
  mRNA product Design i-3 (hSL-A100) comprising derived and/or modified sequence from LASV(803213;Clade II)__AAF86703__GPCmut13 (opt5)
aggagaaagcuuaccaugggccagaucauuaccuucuuucaagaggugccccacgucaucgaagagguuaugaacauugugcugaucgcccucagccugcuugcuauucugaaggggaucuacaauguggccacaugcggacucuucggccugaucuccuuucuucugcucugugggagaucuugcagcgucacguauaaaggaguguacgaacugcagacccuggagcucaacauggcgaaucugaacaugacaaugccucuuuccuguaccaagaauaacucucaucacuauauuaugguuggcaaugaaacagggcuggagcucacccugacaaacaccagcaucauuaaucauaaauucugcaaccuuuccgacgcucacaagaaaaaucuguacgaucaugcccucaugucuaucauuagcacguuucaccuguccaucccgaacuucaaucaguaugaggccaugagcugugacuuuaacggaggcaagauuucugugcaguacaaucugucccacagcuucgcugucgaugccgcuaaccauugcggcaccaucgccaacggggugcuccaaacauuuaugcggauggcguggggaggcucuuauaucgcccuggacuccgggaagggaaauugggauuguauuaugaccagcuaccaguaccuuaucauucagaacacaaccugggaagaccacugccaguucucucgccccuccccuaucggcuaucuggggcuccugagccaaagaacgcgggauauuuacaucucccgcagacuucugggaacauuuaccuggacacucucugacagcgagggcaaugaagcucccggcggguauugucugacccgguggaugcugaucgaggccgagcucaaaugcuucggaaacaccgcuguugccaaguguaaugaaaaacaugaugaggaauuuugcgacaugcugcgccuuuucgauuucaacaagcaggcgauuaaaagacugaagacagaggcccagauguccauccagcucauuaauaaggcugugaacgcccugaucaaugaccaacuuauuaugaaaaaccaucugcgggauaucaugggcaucccuuacugcaauuauagccgcuacugguaucucaaccacacggucaccgggaagacaucucugcccagauguuggcugguguccaauggaagcuaccucaacgaaacccacuuuucugacgacauugagcagcaggcugauaauaugaucacagagaugcugcaaaaagaauacauggaccggcagggcaagaccccucuugggcugguggaucucuucgucuuuagcacguccuucuaucugauuucuaucuuucugcaccuuguuaaaauuccgugaggacuaguuauaagacugacuagcccgaugggccucccaacgggcccuccuccccuccuugcaccgagauuaaucaaaggcucuuuucagagccaccaaaaaaaaaaaaaaaaaaaaaaaaaaaaaaaaaaaaaaaaaaaaaaaaaaaaaaaaaaaaaaaaaaaaaaaaaaaaaaaaaaaaaaaaaaaaaaaaaaaaa

SEQ ID NO: 43144 - RNA, 1572 nt, Artificial Sequence
  mRNA product Design i-3 (hSL-A100) comprising derived and/or modified sequence from LASV(GA391;Clade III)__CAA36645__GPCmut13 (opt5)
aggagaaagcuuaccaugggccagaucgugaccuucuuucaagaggucccccacguuauugaagaggugaugaacaucgugcugauugcccucagcauccuggcuauucuuaaggggcuguacaaugucgccacaugcggacucaucggccuggugacguuccuucugcucuccgggagaucuuguagccugaucuauaaaggaaccuacgaacugcagacacucgagcugaacauggaaacccuuaauaugacaaugccucuguccugcaccaagaacaauucucaucacuauauucggguuggcaacgagacagggcucgagcugacccuuacgaauaccagcauccugaaccauaaauuuuguaaucucuccgacgcgcacaagcgcaaccuguacgaucauucucugaugagcauuaucuccacauuccaccucagcauuccgaauuuuaaccaguaugaagcuaugucuugcgacuucaauggaggcaaaaucaccgugcaguacaaccugucccacagcuuugccgucgaugccgcuggccauugugggacacuugccaauggagugcugcaaaccuucaugagaauggcuuggggcgggucuuauauugcccucgacuccggacggggcaacugggauugcaucaugacgagcuaccaguaccugaucauucagaacacaaccugggacgaucacugucaguuuucucgccccuccccuaucggguaucuuggacugcucagccaaagaacacgggacauuuacaucucccgcagacugcugggcaccuucaccuggacacucucugauagcgagggcaaugaaacgcccgggggauauugccugacccgguggaugcuuauugaggcggagcugaaguguuuuggcaacacagccguugcuaagugcaaugaaaaacaugacgaggaguucugugauaugcuccgccuguuugacuucaacaagcaggccaucagacggcuuaaaaccgaagcucagauguccauccagcugauuaauaaggccgugaacgcgcucaucaaugaucaacugauuaugaaaaaccaucugcgcgacaucauggggauuccuuacugcaauuauagcagauacugguaucucaaccacacaucuaccggaaagacgucccugccccggugcuggcuuaucagcaauggcucuuaccugaacgaaacaaaguucagcgacgauaucgagcagcaggccgacaauaugauuaccgagaugcuccaaaaagaauacaucgaucgccaggggaagaccccucugggacuggucgaccuuuuuguguucuccacaucuuuuuaucucauuagcaucuuccugcaccuggugaaaauuccgugaggacuaguuauaagacugacuagcccgaugggccucccaacgggcccuccuccccuccuugcaccgagauuaaucaaaggcucuuuucagagccaccaaaaaaaaaaaaaaaaaaaaaaaaaaaaaaaaaaaaaaaaaaaaaaaaaaaaaaaaaaaaaaaaaaaaaaaaaaaaaaaaaaaaaaaaaaaaaaaaaaaaa

SEQ ID NO: 43145 - RNA, 1575 nt, Artificial Sequence
  mRNA product Design i-3 (hSL-A100) comprising derived and/or modified sequence from LASV(AV;Clade V)__CCA30314__GPCmut13 (opt5)
aggagaaagcuuaccaugggccagaucgugaccuucuuucaagaggucccccacguuauugaagaggugaugaacaucgugcugauugcccucagcauccuggcuguccuuaaggggcuguacaauauugccacaugcggacucaucggccugaucacguuccuucugcucugugggagauccugcucuagcaaccuguauaaaggaguguacgaacugcagucccucgaccugaauauggagacccuuaacaugacaaugccucugucuuguaccaagaauaacagccaucacuauauucggguuggcaaugauacagggcucgaacugacccuuacaaacaccuccauccugaaucauaaauuuugcaaccucucugacgcgcacaagaaagaucuguacgaccaugcucugaugagcauuaucuccacguuccaccucagcauuccgaauuuuaaccaguaugaggccaugucuugugauuucaauggaggcaagaucuccgugcaguacaaccugagccacucuuaugccauugacgcugccaaucauugcggcaccgucgcuaacgggauccuucaaacauuuaugcgcauggccuggggaggcuccuacaucgcgcuggauagcgggagaggaaacugggacuguauuaugaccucuuaccaguaucucaucauucagaauacaaccugggagaaccacugccaguucucccggcccagcccuaucggcuaccuggggcuucugucccaacgcacgagagauauuuauaucucucggcgccuccugggaacauuuaccuggacacugagcgacuccgaaggcaaugccacccccggcggguacugucucaccagauggaugcugaucgaggcugaacuuaagugcuucggaaacacagccguggcuaaauguaaugagaagcaugaugaggaauuuugcgacaugcugcgccucuucgauuuuaacaaacaggccauuagccggcugaagucugaggcgcagauguccauccagcuuauuaauaaagccguuaacgcucugaucaaugaccaacucauuaugaagaaccaccugagagacaucaugggcaucccuuauugcaauuacagcaaguauugguaccugaaccacacgauuaccgggaaaacaucucuccccaaguguuggcuggugagcaauggauccuaccuuaacgaaacccauuucucugaugacaucgagcagcaggccgauaauaugauuacagaaaugcugcaaaaagaguauauggagcggcagggcaagaccccucucgggcuggucgaccuguucguguuuagcacguccuucuaccuuaucagcauuuuucuccgccuggugaaaaucccgugaggacuaguuauaagacugacuagcccgaugggccucccaacgggcccuccuccccuccuugcaccgagauuaaucaaaggcucuuuucagagccaccaaaaaaaaaaaaaaaaaaaaaaaaaaaaaaaaaaaaaaaaaaaaaaaaaaaaaaaaaaaaaaaaaaaaaaaaaaaaaaaaaaaaaaaaaaaaaaaaaaaaa

SEQ ID NO: 43146 - RNA, 1572 nt, Artificial Sequence
  mRNA product Design i-3 (hSL-A100) comprising derived and/or modified sequence from LASV(Togo/2016/7082;Clade VI)__AMR44577__GPCmut13 (opt5)
aggagaaagcuuaccaugggccagaucauuaccuucuuucaagaggugccccacgucaucgaagagguuaugaacauugugcugaucgcccucagccugcuugcuauucugaaggggguguacaaugucgccacaugcggaaucaucggccucgugacguuccuguuucuuugugggagauccugcucucugauuuauaaaggaagcuacgaacuccagacccuggagcugaacauggaaacacucaauaugaccaugccucuguccuguacaaagaacucuagccaucacuauauccggguuggcaaugagaccgggcuugagcugacacucaccaacacguccauuaucaaucauaaauucugcaaccugucugacgcgcacaagcgcaaucuuuacgaucaugcucugaugagcauucucuccaccuuucaccugagcaucccgaacuucaaucaguaugaagccaugucuugugacuuuaacggaggcaaaauuuccgugcaguacaaucugagccacgccuaugcugucgaugccgcugagcauugcggcacaguggccaacgggguucuccaaaccuucaugagaauggcguggggaggcucuuacaucgcccuggacuccgggcggggaaauugggauuguaucaugacaagcuaccaguaucuuauuauccagaacaccacgugggaagaccacugccaguuuucucgccccuccccuauuggcuaccuggggcuccugagccaaagaacacgggauaucuauauuucccgcagacuucugggaaccuucacauggacccucucugacagcgagggcaacgagacccccggcggguacugucugacacgguggaugcugaucgaagcugagcucaagugcuuuggaaauacggccguggcuaaguguaacgaaaaacaugaugaggaguucugcgacaugcugcgccuuuuugauuucaauaagcaggccauccagagacugaaauccgaagcgcagaugagcauucaacucaucaacaaggccgucaaugcucugauuaacgaccagcuuaucaugaaaaaucaucugcgggauaugaugggcauuccuuauugcaacuacucuaaguauugguaccucaaucacaccuccagcgggcgcacaucucugcccaaguguuggcuggugagcaacggauccuaccucaaugagacccacuucucugacgacaucgaacagcaagccgauaacaugaucacagagaugcugcagaaagaauauauugacagacagggcaagaccccucuugggcugguggaucucuuugucuucagcacguccuuuuaccugaucagcauuuuccugcaccuuaucaaaauuccgugaggacuaguuauaagacugacuagcccgaugggccucccaacgggcccuccuccccuccuugcaccgagauuaaucaaaggcucuuuucagagccaccaaaaaaaaaaaaaaaaaaaaaaaaaaaaaaaaaaaaaaaaaaaaaaaaaaaaaaaaaaaaaaaaaaaaaaaaaaaaaaaaaaaaaaaaaaaaaaaaaaaaa

SEQ ID NO: 43147 - RNA, 1572 nt, Artificial Sequence
  mRNA product Design i-3 (hSL-A100) comprising derived and/or modified sequence from LASV(KAK-428;Clade n.d. (VII))__ANH09740__GPCmut13 (opt5)
aggagaaagcuuaccaugggccagaucgugaccuucuuucaagaggucccccacguuauugaagaggugaugaacaucgugcugauugcccucagccugcuugcuauccugaaggggcucuacaauuucgccacaugcggagucauuggccugaucacguuucuucugcucugugggagauccugcucugcgaccuauaaaggacaguacgaacugcagacacuggagcucaacauggaaagccugaauaugaccaugccucuuuccuguacaaagaacaauucucaucacuauauccgggcuggcaacaauaccgggcuggagcucacacugaccaacacgagcauuaucucccauaaauucugcaaucuuucugacgcccacaagaaaaaccuguacgaucauacccucaugagcauuaucacaaccuuucaccuguccauuccgaauuucaaccaguaugaggccaugagcugugacuuuaauggaggcaagaucucuauucaauacaaccugucccacagcuaugcuggcgaugccgcucagcauugcgggacaguggccaauggaguucuccagaccuucaugcgcauggcguggggcgggucuuaccuggcccuugacuccggaagacggggcugggauuguaucaucagcucuuaccaguaucugauuauccaaaacacgacaugggacgaucacugccaguuuucccgccccagcccuauuggguaccucggauucgugucccagaagaccagagacaucuauauuucucggcgccugcuuggcacauuuaccuggacccugagcgauuccgaaggccaugacaugcccgggggauacugucucacaagauggaugcugaucgaggcugaucugaaaugcuucggcaacacggccgucgcuaaguguaaugaaaaacacgacgaggaguuuugcgauauguggcgccucuucgacuucaacaagcaggccauccaacggcugaaagcggaagcccagaugaauauucagcuuaucaacaaggcugugaaugcccugauuaacgaccaacucaugaugaagaaucaccugagagauaucauggggauuccuuauugcaacuacagcaaauuuugguaucuuaauaacaccacaaccggacggacaucucugccccgcuguuggcucaucuccaauggcagcuaccugaacgagacccauuucucugacgauaucgaacagcaggcugacaauaugauuacggagaugcugcagaaggaauacauggauagacaagggaaaacaccucucggacugguugaccuuuuuguguucagcaccuccuuuuaucugaucaccauuuuccuccaccuggucaagaucccgugaggacuaguuauaagacugacuagcccgaugggccucccaacgggcccuccuccccuccuugcaccgagauuaaucaaaggcucuuuucagagccaccaaaaaaaaaaaaaaaaaaaaaaaaaaaaaaaaaaaaaaaaaaaaaaaaaaaaaaaaaaaaaaaaaaaaaaaaaaaaaaaaaaaaaaaaaaaaaaaaaaaaa

SEQ ID NO: 43148 - RNA, 1572 nt, Artificial Sequence; identical to SEQ ID NO: 43142
  mRNA product Design i-3 (hSL-A100) comprising derived and/or modified sequence from LASV(Pinneo-NIG-1969;Clade I)__AIT17836__GPCmut13 (opt5)

SEQ ID NO: 43149 - RNA, 1572 nt, Artificial Sequence
  mRNA product Design i-3 (hSL-A100) comprising derived and/or modified sequence from LASV(ISTH0009-NIG-2011;Clade II)__AIT17404__GPCmut13 (opt5)
aggagaaagcuuaccaugggccagaucauuaccuucuuucaagaggugccccacgucaucgaagagguuaugaacauugugcugaucgcccucagccugcuugcuauucugaaggggaucuacaauguggccacaugcggacucuucggccuggucuccuuucuucugcucugugggagaucuugcagcacgaccuauaaaggaguguacgaacugcagacacuggagcucgacauggcgucccugaacaugaccaugccucuuucuuguacaaagaauaacagccaucacuauaucaugguuggcaaugaaaccgggcuggagcucacacugaccaacacguccauuaucaaucauaaauucugcaaccuuucugaugcucacaagaaaaaucuguacgaccaugcccucaugagcauuaucuccaccuuucaccugagcauuccgaacuucaaucaguaugaggccaugucuugugauuuuaacggaggcaagaucuccgugcaguacaaucugagccacgcuuaugccgucgacgcugccaaccauugcggcacaauugcgaauggggugcuccaaaccuucaugcggauggccuggggaggcucuuacaucgcucuggauuccgggaagggaagcugggacuguaucaugacaucuuaccaguaucuuauuauccagaacaccacgugggaagaucacugccaguuuucccgccccagcccuauuggcuaccuggggcuccugucccaaagaacacgggacaucuauauuucucgcagacuucugggaaccuucacauggacccucagcgauuccgagggcaacgaaacccccggcggguacugucugacacgguggaugcugaucgaggccgagcucaaaugcuuuggaaauacggcuguugccaaguguaacgaaaaacaugacgaggaguucugcgauaugcugcgccuuuuugacuucaauaagcaggcgaucagacggcugaaaaccgaagcccagaugagcauucagcucaucaacaaggcugugaaugcccugauuaacgaucaacuuaucaugaagaaucaucugcgcgacauuaugggcaucccuuauugcaacuacucuaaauauugguaccucaaucacacagucaccgggaagacaucccugcccagauguuggcuggugagcaacggaucuuaccucaaugaaacccacuucagcgacgauaucgagcagcaggcugacaacaugauuacggagcugcuucaaaaagaauauauggaucggcagggcaagacaccucuggggcucguggaccuguuugucuucuccaccucuuuuuaccugaucagcauuuuccuucaccucaucaaaauuccgugaggacuaguuauaagacugacuagcccgaugggccucccaacgggcccuccuccccuccuugcaccgagauuaaucaaaggcucuuuucagagccaccaaaaaaaaaaaaaaaaaaaaaaaaaaaaaaaaaaaaaaaaaaaaaaaaaaaaaaaaaaaaaaaaaaaaaaaaaaaaaaaaaaaaaaaaaaaaaaaaaaaaa

SEQ ID NO: 43150 - RNA, 1572 nt, Artificial Sequence
  mRNA product Design i-3 (hSL-A100) comprising derived and/or modified sequence from LASV(ISTH2010-NIG-2012;Clade II)__AIT17482__GPCmut13 (opt5)
aggagaaagcuuaccaugggccagaucauuaccuucuuucaagaggugccccacgucaucgaagagguuaugaacauugugcugaucgcccucagccugcuugcuauucugaaggggaucuacaauguggccacaugcggacucuucggccuggucuccuuucuucugcucugugggagaucuugcagcacgaccuauaaaggaguguacgaacugcagacacuggagcucgacauggcgucccugaacaugaccaugccucuuucuuguacaaagaauaacagccaucacuauaucaugguuggcaaugaaaccgggcuggagcucacacugaccaacacguccauuaucaaucauaaauucugcaaccuuucugaugcucacaagaaaaaucuguacgaccaugcccucaugagcauuaucuccaccuuucaccugagcauuccgaacuucaaucaguaugaggccaugucuugugauuuuaacggaggcaagaucuccgugcaguacaaucugagccacgcuuaugccgucgacgcugccaaccauugcggcacaauugcgaauggggugcuccaaaccuucaugcggauggccuggggaggcucuuacaucgcucuggauuccgggaagggaagcugggacuguaucaugacaucuuaccaguaucuuauuauccagaacauuaccugggaagaucacugccaguuuucccgccccagcccuaucggcuaccuggggcuccugucccaaagaacgcgggacauuuauaucucucgcagacuucugggaacauucaccuggacacucagcgauuccgagggcaacgaaacccccggcggguacugucugacccgguggaugcugaucgaggccgagcucaaaugcuuuggaaauacagcuguugccaaguguaacgaaaaacaugacgaggaguucugcgauaugcugcgccuuuuugacuucaauaagcaggcgauuagacggcugaaaacggaagcccagaugagcauccagcucauuaacaaggcugugaaugcccugaucaacgaucaacuuauuaugaagaaucaucugcgcgacaucaugggcaucccuuauugcaacuacucuaaauauugguaccucaaucacaccgucacagggaagaccucccugcccagauguuggcuggugagcaacggaucuuaccucaaugaaacacacuucagcgacgauauugagcagcaggcugacaacaugaucaccgagcugcuucaaaaagaauauauugaucggcagggcaagacgccucuggggcucguggaccuguuugucuucuccacaucuuuuuaccugaucagcauuuuccuucaccucguuaaaaucccgugaggacuaguuauaagacugacuagcccgaugggccucccaacgggcccuccuccccuccuugcaccgagauuaaucaaaggcucuuuucagagccaccaaaaaaaaaaaaaaaaaaaaaaaaaaaaaaaaaaaaaaaaaaaaaaaaaaaaaaaaaaaaaaaaaaaaaaaaaaaaaaaaaaaaaaaaaaaaaaaaaaaaa

SEQ ID NO: 43151 - RNA, 1572 nt, Artificial Sequence
  mRNA product Design i-3 (hSL-A100) comprising derived and/or modified sequence from LASV(Lassa virus/H.sapiens-wt/NGA/2015/ISTH_0543;Clade II)__AVO03639__GPCmut13 (opt5)
aggagaaagcuuaccaugggccagaucauuaccuucuuucaagaggugccccacgucaucgaagagguuaugaacauugugcugaucgcccucagccugcuugcuauucugaaggggaucuacaauguggccacaugcggacucuucggccuggucuccuuucuucugcucugugggagaucuugcagcacgaccuauaaaggaguguacgaacugcagacacuggagcucgacauggcgaaccugaauaugaccaugccucuuuccuguacaaagaacaauucucaucacuauaucaugguuggcaacgaaaccgggcuggagcucacacugaccaauacgagcauuaucaaccauaaauucugcaaucuuuccgaugcucacaagaaaaaccuguacgaccaugcccucaugucuauuaucagcaccuuucaccuguccauuccgaauuucaaccaguaugaggccaugagcugugauuuuaauggaggcaagaucucugugcaguacaaccugucccacacauaugcugucgacgccgcuaaucauugcggcaccauugccaacggggugcuccaaacauucaugcggauggcguggggaggcagcuacaucgcccuggauucugggaagggauccugggacuguaucaugaccagcuaccaguaucuuguuauucagaacacgacaugggaagaucacugccaguuuucucgccccuccccuaucggcuaccuggggcuccugagccaaagaacccgggacauuuauaucucccgcagacuucugggaacauucaccuggacccucucugauagcgagggcaaugaaacacccggcggguacugucugacgcgguggaugcugauugaggcugagcucaaaugcuuuggaaacaccgccguggcuaaguguaaugaaaaacaugacgaggaguucugcgauaugcugcgccuuuuugacuucaacaagcaggccaucagacggcugaaaacagaagcgcagauguccauccagcucauuaauaaggccgucaacgcucugaucaaugaucaacuuauuaugaagaaccaucugcgcgacaucaugggcauuccuuauugcaauuacagcaaauauugguaccucaaccacaccgugacagggaagaccucucugcccagauguuggcugguguccaauggaagcuaccucaacgaaacgcacuucucugacgauaucgagcagcaggccgacaauaugaucacagagcugcuucaaaaagaauauauugaucggcagggcaagaccccucuggggcucgucgaccuguuuguuuucagcaccuccuuuuaccugaucucuauuuuccuucaccucgugaaaaucccgugaggacuaguuauaagacugacuagcccgaugggccucccaacgggcccuccuccccuccuugcaccgagauuaaucaaaggcucuuuucagagccaccaaaaaaaaaaaaaaaaaaaaaaaaaaaaaaaaaaaaaaaaaaaaaaaaaaaaaaaaaaaaaaaaaaaaaaaaaaaaaaaaaaaaaaaaaaaaaaaaaaaaa

SEQ ID NO: 43152 - RNA, 1572 nt, Artificial Sequence
  mRNA product Design i-3 (hSL-A100) comprising derived and/or modified sequence from LASV(Lassa virus/H.sapiens-wt/NGA/2016/ISTH_0009;Clade II)__AVO03571__GPCmut13 (opt5)
aggagaaagcuuaccaugggccagaucauuaccuucuuucaagaggugccccacgucaucgaagagguuaugaacauugugcugaucgcccucagccugcuugcuauucugaaggggaucuacaauguggccacaugcggacuccugggccuugucuccuuccugcuccugugugggagaucuugcagcacgaccuauaaaggaguguacgaacugcagacacucgagcuggacauggcgucccuuaacaugaccaugccucugucuuguacaaagaauaacagccaucacuauaucaugguuggcaaugaaaccgggcucgagcugacacuuaccaacacguccauuaucaaucauaaauuuugcaaccugucugaugcucacaagaaaaaucucuacgaccaugcccugaugagcauuaucuccaccuuccaccugagcauuccgaacuuuaaucaguaugaggccaugucuugugauuucaacggaggccggaucuccgugcaguacaaucucagccacucuuaugcugucgacgccgcuaaccauugcggcacaauugccaauggggugcugcaaaccuuuaugcgcauggcguggggaggcuccuacaucgcccuugauagcgggaagggaucuugggacuguaucaugacauccuaccaguaucugauuauccagaacaccacgugggaagaucacugccaguucagcagacccuccccuauuggcuaccucgggcugcuuucucaacggacacgcgacaucuauauuagcagacggcugcucggaaccuuuacauggacccuguccgauagcgagggcaacgaaacccccggcggguacugucugacacgcuggaugcucaucgaggcugagcugaagugcuucggaaauacggccguugcuaaauguaacgaaaagcaugacgaggaauuuugcgauaugcuuagacuguucgacuuuaauaaacaggccauccggcgccucaagaccgaggcgcagaugucuauucagcugaucaacaaagccgugaaugcucuuauuaacgaucaacugaucaugaagaaucaccucagagacauuaugggcaucccuuauugcaacuacuccaaguauugguaccugaaucacacagucaccgggaaaacaagccugccccgguguuggcucgugucuaacggaagcuaccugaaugaaacccauuucuccgacgauaucgagcagcaggccgacaacaugauuacggagcuucugcaaaaggaauauaucgaucgccagggcaaaacaccucucgggcugguggaccuguucgucuuuucuaccagcuucuaccuuauuuccaucuuucuccaccugguuaagauuccgugaggacuaguuauaagacugacuagcccgaugggccucccaacgggcccuccuccccuccuugcaccgagauuaaucaaaggcucuuuucagagccaccaaaaaaaaaaaaaaaaaaaaaaaaaaaaaaaaaaaaaaaaaaaaaaaaaaaaaaaaaaaaaaaaaaaaaaaaaaaaaaaaaaaaaaaaaaaaaaaaaaaaa

SEQ ID NO: 43153 - RNA, 1572 nt, Artificial Sequence
  mRNA product Design i-3 (hSL-A100) comprising derived and/or modified sequence from LASV(Lassa virus/H.sapiens-wt/NGA/2016/ISTH_0017;Clade II)__AVO03567__GPCmut13 (opt5)
aggagaaagcuuaccaugggccagaucauuaccuucuuucaagaggugccccacgucaucgaagagguuaugaacauugugcugaucgcccucagccugcuugcuauucugaaggggaucuacaauguggccacaugcggacucuucggccuggucuccuuucuucugcucugugggagaucuugcagcacgaccuauaaaggaguguacgaacugcagacacuggagcucgacauggcgucccugaacaugaccaugccucuuucuuguacaaagaauaacagccaucacuauaucaugguuggcaaugaaaccgggcuggagcucacacugaccaacacguccauuaucaaucauaaauucugcaaccuuucugaugcucacaagaaaaaucuguacgaccaugcccucaugagcauuaucuccaccuuucaccugagcauuccgaacuucaaucaguaugaggccaugucuugugauuuuaacggaggcaagaucuccgugcaguacaaucugagccacacauaugcuauugacgccgcuaaccauugcggcaccaucgccaaugggguccuccaaacauucaugcggauggcguggggaggcucuuacaucgcccuggauuccgggaagggaagcugggacuguauuaugaccucuuaccaguaucuuaucauucagaacacgacaugggaagaucacugccaguuuucccgccccagcccuaucggcuaccuggggcuccugucccaaagaacccgggacauuuauaucucucgcagacuucugggaacauucaccuggacccucagcgauuccgagggcaacgaaacacccggcggguacugucugacgcgguggaugcugaucgaggcugagcucaaaugcuuuggaaauaccgccguggcuaaguguaacgaaaaacaugacgaggaguucugcgauaugcugcgccuuuuugacuucaauaagcaggccauuagacggcugaaaacagaagcgcagaugagcauccagcucauuaacaaggccguuaaugcucugaucaacgaucaacuuauuaugaagaaucaucugcgcgacaucaugggcaucccuuauugcaacuacucuaaauauugguaccucaaucacaccgugacagggaagaccucccugcccagauguuggcuggucagcaacggaucuuaccucaaugaaacgcacuucagcgacgauauugagcagcaggccgacaacaugaucacagagcugcuucaaaaagaauauauggaucggcagggcaagaccccucuggggcucguggaccuguuuguguucuccaccucuuuuuaccugauuagcaucuuccuucaccucguccgcauuccgugaggacuaguuauaagacugacuagcccgaugggccucccaacgggcccuccuccccuccuugcaccgagauuaaucaaaggcucuuuucagagccaccaaaaaaaaaaaaaaaaaaaaaaaaaaaaaaaaaaaaaaaaaaaaaaaaaaaaaaaaaaaaaaaaaaaaaaaaaaaaaaaaaaaaaaaaaaaaaaaaaaaaa

SEQ ID NO: 43154 - RNA, 1572 nt, Artificial Sequence
  mRNA product Design i-3 (hSL-A100) comprising derived and/or modified sequence from LASV(Lassa virus/H.sapiens-wt/NGA/2018/ISTH_0959;Clade II)__AVV65099__GPCmut13 (opt5)
aggagaaagcuuaccaugggccagaucauuaccuucuuucaagaggugccccacgucaucgaagagguuaugaacauugugcugaucgcccucagccugcuugcuauucugaaggggaucuacaauguggucacaugcggacucuucggccugguguccuuucuucugcucugugggagaucuugcagcacgaccuauaaaggaguuuacgaacugcagacacuggagcucgacauggccucccugaacaugaccaugccucuuucuuguacaaagaauaacagccaucacuauaucauggugggcaaugaaaccgggcuggagcucacacugaccaacacguccauuaucaaucauaaauucugcaaccuuucugaugcgcacaagaaaaaucuguacgaccaugcucucaugagcauuaucuccaccuuucaccugagcauuccgaacuucaaucaguaugaggccaugucuugugauuuuaacggaggcaagaucuccguccaguacaaucugagccacgccuaugcuauugacgccgcuaaccauugcggcacaaucgccaauggggugcuccaaaccuucaugcggauggcguggggaggcucuuacaucgcccuggauuccgggaagggaagcugggacuguauuaugacaucuuaccaguaucuuaucauucagaacaccacgugggaagaucacugccaguuuucccgccccagcccuaucggcuaccuggggcuccugucccaaagaacacgggacauuuauaucucucgcagacuucugggaaccuucacauggacccucagcgauuccgagggcaacgaaacccccggcggguacugucugacacgguggaugcugaucgaggcugagcucaaaugcuuuggaaauacggccguugcuaaguguaacgaaaaacaugacgaggaguucugcgauaugcugcgccuuuuugacuucaauaagcaggccauuagacggcugaaaaccgaagcgcagaugagcauccagcucauuaacaaggccgugaaugcucugaucaacgaucaacuuauuaugaagaaucaucugcgcgacaucaugggcaucccuuauugcaacuacucuaaauauugguaccucaaucacacagucaccgggaagacaucccugcccagauguuggcuggugagcaacggaucuuaccucaaugaaacccacuucagcgacgauauugagcagcaggccgacaacaugaucacggagcugcuucaaaaagaauauauugaucggcagggcaagacaccucuggggcucguggaccuguuugucuucuccaccucuuuuuaccugaucagcauuuuccuucaccucguuaaaaucccgugaggacuaguuauaagacugacuagcccgaugggccucccaacgggcccuccuccccuccuugcaccgagauuaaucaaaggcucuuuucagagccaccaaaaaaaaaaaaaaaaaaaaaaaaaaaaaaaaaaaaaaaaaaaaaaaaaaaaaaaaaaaaaaaaaaaaaaaaaaaaaaaaaaaaaaaaaaaaaaaaaaaaa

SEQ ID NO: 43155 - RNA, 1572 nt, Artificial Sequence
  mRNA product Design i-3 (hSL-A100) comprising derived and/or modified sequence from LASV(LASV003-NIG-2008;Clade II)__AIT17580__GPCmut13 (opt5)
aggagaaagcuuaccaugggccagaucauuaccuucuuucaagaggugccccacgucaucgaagagguuaugaacauugugcugaucgcccucagccugcuugcuauucugaaggggaucuacaauguggccacaugcggacucuucggccuggucuccuuucuucugcucugugggagaucuugcagcacgaccuauaaaggaguguacgaacugcagacacuggagcucgacauggcgucccugaacaugaccaugccucuuucuuguacaaagaauaacagccaucacuauaucaugguuggcaaugaaaccgggcuggagcucacacugaccaacacguccauuaucaaucauaaauucugcaaccuuucugaugcucacaagaaaaaucuguacgaccaugcccucaugagcauuaucuccaccuuucaccugagcauuccgaacuucaaucaguaugaggccaugucuugugauuuuaacggaggcaagaucuccgugcaguacaaucugagccacacauaugcugucgacgccgcuaaccauugcggcaccauugccaauggggugcuccaaacauucaugcggauggcguggggaggcucuuacaucgcccuggauuccgggaagggaagcugggacuguaucaugaccucuuaccaguaucuuauuauccagaacacgacaugggaagaucacugccaguuuucccgccccagcccuauuggcuaccuggggcuccugucccaaagaacccgggacaucuauauuucucgcagacuucugggaacauucaccuggacccucagcgauuccgagagcaacgaaacacccggcggcuacugucugacgcgguggaugcugaucgaggcugagcucaaaugcuuugggaauaccgccguugcuaaguguaacgaaaaacaugacgaggaguucugcgauaugcugcgccuuuuugacuucaauaagcaggccaucagacggcugaaagcggaagcccagaugucuauucagcucaucaacaaggcugugaaugcccugauuaacgaucaacuuaucaugaagaaucaucugcgcgacauuaugggaaucccuuauugcaacuacuccaaauauugguaccucaaucacacagucaccggcagaacaagccugccccgguguuggcuggugucuaacgggagcuaccucaaugaaacccacuucuccgacgauaucgagcagcaggcugacaacaugauuacggagcugcuucaaaaggaauauauggaucgccagggaaaaacaccucugggccucguggaccuguuugucuucucuaccagcuuuuaccugaucuccauuuuccuucaccucguuaagaucccgugaggacuaguuauaagacugacuagcccgaugggccucccaacgggcccuccuccccuccuugcaccgagauuaaucaaaggcucuuuucagagccaccaaaaaaaaaaaaaaaaaaaaaaaaaaaaaaaaaaaaaaaaaaaaaaaaaaaaaaaaaaaaaaaaaaaaaaaaaaaaaaaaaaaaaaaaaaaaaaaaaaaaa

SEQ ID NO: 43156 - RNA, 1572 nt, Artificial Sequence
  mRNA product Design i-3 (hSL-A100) comprising derived and/or modified sequence from LASV(LASV035-NIG-2009;Clade II)__AIT17588__GPCmut13 (opt5)
aggagaaagcuuaccaugggccagaucauuaccuucuuucaagaggugccccacgucaucgaagagguuaugaacauugugcugaucgcccucagccugcuugcuauucugaaggggaucuacaauguggccacaugcggacucuucggccuggucuccuuucuucugcucugugggagaucuugcagcacgaccuauaaaggaguguacgaacugcagacacuggagcucgacauggcgucccugaacaugaccaugccucuuucuuguacaaagaauaacagccaucacuauaucaugguuggcaaugaaaccgggcuggagcucacacugaccaacacguccauuaucaaucauaaauucugcaaccuuucugaugcucacaagaaaaaucuguacgaccaugcccucaugagcauuaucuccaccuuucaccugagcauuccgaacuucaaucaguaugaggccaugucuugugauuuuaacggaggcaagaucuccgugcaguacaaucugagccacgcuuaugccgucgacgcugccaaccauugcggcacaauugcgaauggggugcuccaaaccuucaugcggauggccuggggaggcucuuacaucgcucuggauuccgggaagggaagcugggacuguaucaugacaucuuaccaguaucuuauuauccagaacaccacgugggaagaucacugccaguuuucccgccccagcccuauuggcuaccuggggcuccugucccaaagaacacgggacaucuauauuucucgcagacuucugggaaccuucacauggacccucagcgauuccgagggcaacgaaacccccggcggguacugucugacacgguggaugcugaucgaggccgagcucaaaugcuuuggaaauacggcuguugccaaguguaacgaaaaacaugacgaggaguucugcgauaugcugcgccuuuuugacuucaauaagcaggcgaucagacggcugaaagccgaagcucagaugagcauucagcucaucaacaaggccgugaaugcucugauuaacgaucaacuuaucaugaagaaucaucugcgcgacauuaugggcaucccuuauugcaacuacucuaaauauugguaccucaaucacaccgucacagggaagaccucccugcccagauguuggcuggugagcaacggaucuuaccucaaugaaacacacuucagcgacgauaucgagcagcaggccgacaacaugauuaccgagcugcuucaaaaagaauauaucgaucggcagggcaagacgccucuggggcucguggaccuguuugucuucuccacaucuuuuuaccugauuagcaucuuccuucaccucguuaaaauuccgugaggacuaguuauaagacugacuagcccgaugggccucccaacgggcccuccuccccuccuugcaccgagauuaaucaaaggcucuuuucagagccaccaaaaaaaaaaaaaaaaaaaaaaaaaaaaaaaaaaaaaaaaaaaaaaaaaaaaaaaaaaaaaaaaaaaaaaaaaaaaaaaaaaaaaaaaaaaaaaaaaaaaa

SEQ ID NO: 43157 - RNA, 1572 nt, Artificial Sequence
  mRNA product Design i-3 (hSL-A100) comprising derived and/or modified sequence from LASV(LASV1000-NIG-2009;Clade II)__AIT17782__GPCmut13 (opt5)
aggagaaagcuuaccaugggccagaucauuaccuucuuucaagaggugccccacgucaucgaagagguuaugaacauugugcugaucgcccucagccugcuugcuauucugaaggggaucuacaauguggccacaugcggacucuucggccuggucuccuuucuucugcucugugggagaucuugcagcacgaccuauaaaggaguguacgaacugcagacacuggagcucgacauggcgucccugaacaugaccaugccucuuucuuguacaaagaauaacagccaucacuauaucaugguuggcaaugaaaccgggcuggagcucacacugaccaacacguccauuaucaaucauaaauucugcaaccuuucugaugcucacaagaaaaaucuguacgaccaugcccucaugagcauuaucuccaccuuucaccugagcauuccgaacuucaaucaguaugaggccaugucuugugauuuuaacggaggcaagaucuccgugcaguacaaucugagccacacauaugcugucgacgccgcuaaccauugcggcaccauugccaauggggugcuccaaacauucaugcggauggcguggggaggcucuuacaucgcccuggauuccgggaagggaagcugggacuguaucaugaccucuuaccaguaucuuauuauccagaacacgacaugggaagaucacugccaguuuucccgccccagcccuauuggcuaccuggggcuccugucccaaagaacccgggacaucuauauuucucgcagacuucugggaacauucaccuggacccucagcgauuccgagggcaacgaaacacccggcggguacugucugacgcgguggaugcugaucgaggcugagcucaaaugcuuuggaaauaccgccguugcuaaguguaacgaaaaacaugacgaggaguucugcgauaugcugcgccuuuuugacuucaauaagcaggccaucaaaagacugaagacagaagcgcagaugagcauucagcucaucaacaaggccgugaaugcucugauuaacgaucaacuuaucaugaaaaaucaucugcgggacauuaugggcaucccuuauugcaacuacucuaaguauugguaccucaaucacaccgucacagggaaaaccucccugccccgcuguuggcuggugagcaacggaucuuaccucaaugaaacgcacuucagcgacgauaucgagcagcaggccgacaacaugauuacagagcugcuucaaaaggaauauaucgauagacagggcaaaaccccucuggggcucguggaccuguuugucuucuccaccucuuuuuaccugauuagcaucuuccuucaccucguuaagauuccgugaggacuaguuauaagacugacuagcccgaugggccucccaacgggcccuccuccccuccuugcaccgagauuaaucaaaggcucuuuucagagccaccaaaaaaaaaaaaaaaaaaaaaaaaaaaaaaaaaaaaaaaaaaaaaaaaaaaaaaaaaaaaaaaaaaaaaaaaaaaaaaaaaaaaaaaaaaaaaaaaaaaaa

SEQ ID NO: 43158 - RNA, 1572 nt, Artificial Sequence
  mRNA product Design i-3 (hSL-A100) comprising derived and/or modified sequence from LASV(LASV221-NIG-2010;Clade II)__AIT17624__GPCmut13 (opt5)
aggagaaagcuuaccaugggccagaucauuaccuucuuucaagaggugccccacgucaucgaagagguuaugaacauugugcugaucgcccucagccugcuugcuauucugaaggggaucuacaauguggccacaugcggacucuucggccuggucuccuuucuucugcucugugggagaucuugcagcacgaccuauaaaggaguguacgaacugcagacacuggagcucgacauggcgucccugaacaugaccaugccucuuucuuguacaaagaauaacagccaucacuauaucaugguuggcaaugaaaccgggcuggagcucacacugaccaacacguccauuaucaaucauaaauucugcaaccuuucugaugcucacaagaaaaaucuguacgaccaugcccucaugagcauuaucuccaccuuucaccugagcauuccgaacuucaaucaguaugaggccaugucuugugauuuuaacggaggcaagaucuccgugcaguacaaucugagccacacauaugcuauugacgccgcuaaccauugcggcaccaucgccaaugggguccuccaaacauucaugcggauggcguggggaggcucuuacaucgcccuggauuccgggaagggaagcugggacuguauuaugaccucuuaccaguaucuuaucauucagaacacgacaugggaagaucacugccaguuuucccgccccagcccuaucggcuaccuggggcuccugucccaaagaacccgggacauuuauaucucucgcagacuucugggaacauucaccuggacccucagcgauuccgagggcaacgaaacacccggcggguacugucugacgcgguggaugcugaucgaggcugagcucaaaugcuuuggaaauaccgccguggcuaaguguaacgaaaaacaugacgaggaguucugcgauaugcugcgccuuuuugacuucaauaagcaggccauuagacggcugaaaacagaagcgcagaugagcauccagcucauuaacaaggccguuaaugcucugaucaacgaucaacuuauuaugaagaaucaucugcgcgacaucaugggcaucccuuauugcaacuacucuaaauauugguaccucaaucacaccgugacagggaagaccucccugcccagauguuggcuggucagcaacggaucuuaccucaaugaaacgcacuucagcgacgauauugagcagcaggccgacaacaugaucacagagaugcugcaaaaagaauauauggaucggcagggcaagaccccucuugggcugguggaccucuuuguguucuccaccucuuuuuaccugauuagcaucuuccugcaccuugucaaaauuccgugaggacuaguuauaagacugacuagcccgaugggccucccaacgggcccuccuccccuccuugcaccgagauuaaucaaaggcucuuuucagagccaccaaaaaaaaaaaaaaaaaaaaaaaaaaaaaaaaaaaaaaaaaaaaaaaaaaaaaaaaaaaaaaaaaaaaaaaaaaaaaaaaaaaaaaaaaaaaaaaaaaaaa

SEQ ID NO: 43159 - RNA, 1572 nt, Artificial Sequence
  mRNA product Design i-3 (hSL-A100) comprising derived and/or modified sequence from LASV(LASV237-NIG-2010;Clade II)__AIT17638__GPCmut13 (opt5)
aggagaaagcuuaccaugggccagaucauuaccuucuuucaagaggugccccacgucaucgaagagguuaugaacauugugcugaucgcccucagccugcuugcuauucugaaggggaucuacaauguggccacaugcggacucuucggccuggucuccuuucuucugcucugugggagaucuugcagcacgaccuauaaaggaguguacgaacugcagacacuggagcucgacauggcgucccugaacaugaccaugccucuuucuuguacaaagaauaacagccaucacuauaucaugguuggcaaugaaaccgggcuggagcucacacugaccaacacguccauuaucaaucauaaauucugcaaccuuucugaugcucacaagaaagaccuguacgaucaugcccucaugagcauuaucuccaccuuucaccugagcauuccgaauuucaaccaguaugaggccaugucuugugacuuuaauggaggcaagaucuccgugcaguacaaccugagccacacauaugcugucgaugccgcuaaucauugcggcaccauugccaacggggugcuccaaacauucaugcggauggcguggggaggcucuuacaucgcccuggacuccgggaagggaagcugggauuguaucaugaccucuuaccaguaucuuauuauccagaauacgacaugggaagaccacugccaguuuucccgccccagcccuauuggcuaccuggggcuccugucccaaagaacccgggauaucuauauuucucgcagacuucugggaacauucaccuggacccucagcgacuccgagggcaacgaaacacccggcggguacugucugacgcgguggaugcugaucgaggcugagcucaaaugcuuuggaaacaccgccguugcuaaguguaaugaaaaacaugaugaggaguucugcgacaugcugcgccuuuuugauuucaacaagcaggccaucagacggcugaaaacagaagcgcagaugagcauucagcucaucaauaaggccgugaacgcucugauuaaugaccaacuuaucaugaagaaccaucugcgcgacauuaugggcaucccuuauugcaauuacucuaaauauugguaccucaaccacaccgucacagggaagaccucccugcccagauguuggcuggugagcaauggaucuuaccucaacgaaacgcacuucagcgaugacaucgagcagcaggccgauaauaugauuacagagcugcuucaaaaagaauauauggaccggcagggcaagaccccucuggggcucguggaucuguuugucuucuccaccucuuuuuaccugaucagcauuuuccuucaccucaucaaaauuccgugaggacuaguuauaagacugacuagcccgaugggccucccaacgggcccuccuccccuccuugcaccgagauuaaucaaaggcucuuuucagagccaccaaaaaaaaaaaaaaaaaaaaaaaaaaaaaaaaaaaaaaaaaaaaaaaaaaaaaaaaaaaaaaaaaaaaaaaaaaaaaaaaaaaaaaaaaaaaaaaaaaaaa

SEQ ID NO: 43160 - RNA, 1572 nt, Artificial Sequence
  mRNA product Design i-3 (hSL-A100) comprising derived and/or modified sequence from LASV(LASV253-NIG-2011;Clade II)__AIT17670__GPCmut13 (opt5)
aggagaaagcuuaccaugggccagaucauuaccuucuuucaagaggugccccacgucaucgaagagguuaugaacauugugcugaucgcccucagccugcuugcuauucugaaggggaucuacaauguggccacaugcggacucuucggccuggucuccuuucuucugcucugugggagaucuugcagcacgaccuauaaaggaguguacgaacugcagacacuggagcucgacauggcgucccugaacaugaccaugccucuuucuuguacaaagaauaacagccaucacuauaucaugguuggcaaugaaaccgggcuggagcucacacugaccaacacguccauuaucaaucauaaauucugcaaccuuucugaugcucacaagaaaaaucuguacgaccaugcccucaugagcauuaucuccaccuuucaccugagcauuccgaacuucaaucaguaugaggccaugucuugugauuuuaacggaggcaagaucuccgugcaguacaaucugagccacacauaugcugucgacgccgcuaaccauugcggcaccauugccaauggggugcuccaaacauucaugcggauggcguggggaggcucuuacaucgcccuggauuccgggaagggaagcugggacuguaucaugaccucuuaccaguaucuuauuauccagaacacgacaugggaagaucacugccaguuuucccgccccagcccuauuggcuaccuggggcuccugucccaaagaacccgggacaucuauauuucucgcagacuucugggaacauucaccuggacccucagcgauuccgagggcaacgaaacacccggcggguacugucugacgcgguggaugcugaucgaggcugagcucaaaugcuuuggaaauaccgccguugcuaaguguaacgaaaaacaugacgaggaguucugcgauaugcugcgccuuuuugacuucaauaagcaggccaucagacggcugaaagcggaagcccagaugagcauucagcucaucaacaaggcugugaaugcccugauuaacgaucaacuuaucaugaagaaucaucugcgcgacauuaugggcaucccuuauugcaacuacucuaaauauugguaccucaaucacacagucaccgggagaacaucccugccccgguguuggcuggugagcaacggaucuuaccucaaugaaacccacuucagcgacgauaucgagcagcaggcugacaacaugauuacggagcugcuucaaaaggaauauaucgaucgccagggcaaaacaccucuggggcucguggaccuguuugucuucuccaccucuuuuuaccugauuagcaucuuccuucaccucguuaagauuccgugaggacuaguuauaagacugacuagcccgaugggccucccaacgggcccuccuccccuccuugcaccgagauuaaucaaaggcucuuuucagagccaccaaaaaaaaaaaaaaaaaaaaaaaaaaaaaaaaaaaaaaaaaaaaaaaaaaaaaaaaaaaaaaaaaaaaaaaaaaaaaaaaaaaaaaaaaaaaaaaaaaaaa

SEQ ID NO: 43161 - RNA, 1572 nt, Artificial Sequence
  mRNA product Design i-3 (hSL-A100) comprising derived and/or modified sequence from LASV(LASV254-NIG-2011;Clade II)__AIT17674__GPCmut13 (opt5)
aggagaaagcuuaccaugggccagaucauuaccuucuuucaagaggugccccacgucaucgaagagguuaugaacauugugcugaucgcccucagccugcuugcuauucugaaggggaucuacaauguggccacaugcggacucuucggccuggucuccuuucuucugcucugugggagaucuugcagcacgaccuauaaaggaguguacgaacugcagacacuggagcucgacaugaccaaccugaauaugacaaugccucuuuccuguaccaagaacaauucucaucacuauaucaugguuggcaacgaaacagggcuggagcucacccugacgaauaccagcauuaucaaccauaaauucugcaaucuuuccgaugcgcacaagaaaaaccuguacaaucaugcucucaugucuauuaucagcacauuucaccuguccauuccgaacuucaaucaguaugaggccaugagcugugacuuuaacggaggcaagaucucugugcaguacaaucugucccacagcuaugccgucgaugcugccaaccauugcggcaccauugcuaacggggugcuccaaacauucaugcggauggccuggggaggcucuuacaucgcgcuggacuccgggaagggaaauugggauuguaucaugaccagcuaccaguaucuuauuauccagaacacgacaugggaagaccacugccaguuuucucgccccuccccuauuggcuaccuggggcuccugagccaaagaacccgggauaucuauauuucccgcagacuucugggaacauucaccuggacccucucugacagcgagggcaaugaaacacccggcggguacugucugacgcgguggaugcugaucgaggccgagcucaaaugcuuuggaaacaccgcuguugccaaguguaaugaaaaacaugaugaggaguucugcgacaugcugcgccuuuuugauuucaacaagcaggcuaucagacggcugaaaacagaagcccaggcgaauauucagcucaucaacaaggccgugaaugcucugauuaacgaccaacuuaucaugaagaaucaucugcgcgauauuaugggcaucccuuauugcaacuacuccaaauauugguaccucaaucacaccgucacagggaagaccagccugcccagauguuggcuggugucuaacggauccuaccucaaugaaacgcacuucagcgacgacaucgagcagcaggccgauaacaugauuacagagcugcuucaaaaagaauauauggaccggcagggcaagaccccucuggggcucguggaucuguuugucuucucuaccagcuuuuaccugaucuccauuuuccuucaccucguuaaaaucccgugaggacuaguuauaagacugacuagcccgaugggccucccaacgggcccuccuccccuccuugcaccgagauuaaucaaaggcucuuuucagagccaccaaaaaaaaaaaaaaaaaaaaaaaaaaaaaaaaaaaaaaaaaaaaaaaaaaaaaaaaaaaaaaaaaaaaaaaaaaaaaaaaaaaaaaaaaaaaaaaaaaaaa

SEQ ID NO: 43162 - RNA, 1572 nt, Artificial Sequence
  mRNA product Design i-3 (hSL-A100) comprising derived and/or modified sequence from LASV(Nig08-A19;Clade III)__ADU56618__GPCmut13 (opt5)
aggagaaagcuuaccaugggccagaucgugaccuucuuucaagaggucccccacguuauugaagaggugaugaacaucgugcugauugcccucagcauccuggcuauucuuaaggggcuguacaauaucgccacaugcggacucaucggccuggucacguuccuucugcucuccgggagaucuuguagcaugaccuauaaaggaguguacgaacugcagacacuggagcucaacaugaauacccugaacaugacaaugccucuuuccugcaccaagaauaacucucaucacuauauuaugguuggcaaugaaacagggcuggagcucacccugacgaacaccagccuucugcaucacaaauuuuguaaucucuccgacgcgcauaagaaaaaccuguacgaucacacacugaugucuaucauuagcaccuuccaccucuccaucccgaauuuuaaccaguaugaggcuaugagcugcgacuucaauggaggcaagauuacagugcaguacaaccugucucauuccuaugccaucgaugccgcuaaucacuguggcaccgucgccaacggggugcuucaaacguuuaugcggauggcuuggggaggcagcuacauugcccuggacucugggcgcggaaagugggauugcaucaugacauccuaccaguaucucaucauucagaacaccacaugggaagaccauugucaguucagcagacccucuccuaucggcuaccuggggcuucugucccaacggacccgcgauauuuauaucagcagacggcuccugggaaccuuuacauggacgcuguccgacucugagggcaaugaaacccccggcggguacugccucacacgcuggaugcugauugaggcggagcuuaaauguuucggaaacaccgccguugcuaagugcaaugaaaaacacgaugaggaauuuugugacaugcugagacucuucgauuuuaacaagcaggccauccggcgccugaaagcugaggcccagaugagcauccagcuuauuaauaaggcggugaacgcccugaucaaugaccaacucauuaugaagaaccaccugagagauaucaugggcauuccuuauugcaauuacuccaaauauugguaccugaaccauacaagcaccgggcggacgucucucccccgcugcuggcuggucuccaauggaagcuaccuuaacgaaacacacuucucugacgacaucgagcagcaggcugauaauaugaucaccgagaugcugcaaaaggaauaucucgacagacagggcaaaaccccucuggggcugguggaucuuuucguguuuagcacauccuucuaccucauuucuaucuuucugcaucuggucaagauuccgugaggacuaguuauaagacugacuagcccgaugggccucccaacgggcccuccuccccuccuugcaccgagauuaaucaaaggcucuuuucagagccaccaaaaaaaaaaaaaaaaaaaaaaaaaaaaaaaaaaaaaaaaaaaaaaaaaaaaaaaaaaaaaaaaaaaaaaaaaaaaaaaaaaaaaaaaaaaaaaaaaaaaa

SEQ ID NO: 43163 - RNA, 1575 nt, Artificial Sequence
  mRNA product Design i-3 (hSL-A100) comprising derived and/or modified sequence from LASV(G1180-SLE-2010;Clade IV)__AIT17168__GPCmut13 (opt5)
aggagaaagcuuaccaugggccagaucgugaccuucuuucaagaggucccccacguuauugaagaggugaugaacaucgugcugauugcccucagcauccuggcuguccuuaaggggcuguacaauuucgccacaugcggacucgugggccugcuuacguuucugcuccugugugggagauccugcaccgcgucucgguauaaaggaguuuacgaacugcagacacucgagcugaacauggaaacccuuaauaugacaaugccucugagcuguaccaagaacaauucccaucacuauauuauggugggcaacgagacagggcucgagcugacccuuacgaauaccucuaucaucaaccauaaauucugcaaucugagcgacgcucacaagaaaaaccucuacgaucaugcccugauguccauuaucucuacauuucaccugagcauuccgaauuucaaccaguaugaagccauguccugugacuuuaauggaggcaagaucagcguccaguacaaccucucucacuccuaugcuggcgaugccgcuaaucauugcgggaccguggccaacggaguucugcaaacauucaugcgcauggcguggggcgggagcuacauugcccuugacucuggacacggcuccugggauuguaucaugaccagcuaccaguaucugauuauccagaacacgacaugggaggaccauugccaguuuucuagacccuccccuaucggguaccucggacugcuuagccaacggacccgcgauauuuauaucuccagacggcugcucggcacauucaccuggacccugucugacagcgaaggcaaggauacacccgggggauacugucugacgcgcuggaugcucauugaggcugagcugaaaugcuuuggcaauaccgccguggcuaaguguaacgaaaaacacgacgaggaguucugcgauaugcuuagacuguuugacuucaauaagcaggccauccagcggcucaaagcggaagcccagauguccauucaacugaucaacaaggcugucaaugcccuuaucaacgaucagcugauuaugaagaaucaccuccgcgacaucauggggauuccuuauugcaacuacagcaaauauugguaccugaaucauacaaccacaggaaagaccucucugcccaaauguuggcucguguccaacggcagcuaccugaaugaaacgcacuucucugacgauaucgagcagcaagcugacaacaugauuacagagaugcuucagaaggaauauauggagagacaggggaaaaccccucugggacucguggaucuguuugucuucagcaccuccuuuuaccugaucucuaucuuccuucaucucguuaagauuccgugaggacuaguuauaagacugacuagcccgaugggccucccaacgggcccuccuccccuccuugcaccgagauuaaucaaaggcucuuuucagagccaccaaaaaaaaaaaaaaaaaaaaaaaaaaaaaaaaaaaaaaaaaaaaaaaaaaaaaaaaaaaaaaaaaaaaaaaaaaaaaaaaaaaaaaaaaaaaaaaaaaaaa

SEQ ID NO: 43164 - RNA, 1575 nt, Artificial Sequence
  mRNA product Design i-3 (hSL-A100) comprising derived and/or modified sequence from LASV(G1442-SLE-2011;Clade IV)__AIT17180__GPCmut13 (opt5)
aggagaaagcuuaccaugggccagaucgugaccuucuuucaagaggucccccacguuauugaagaggugaugaacaucgugcugauugcccucagcauccuggcuguccuuaaggggcuguacaauguggccacaugcggacucauuggccugguuacguuccuucugcucugugggagauccugcaccacaacccuguauaaaggaguguacgaacugcagacacucgagcugaacauggaaacccuuaauaugacaaugccucugucuuguaccaagaacaauagccaucacuauauccgggucggcaacgagacggggcucgagcugacccuuacaaauaccuccaucauuaaccauaaauuuugcaaucugucugacgcgcacaagaaaaaccucuacgaucaugcucugaugagcaucauuuccacauuccaccugucuaucccgaauuuuaaccaguaugaagccaugagcugugacuucaauggaggcaagauuuccgugcaguacaaccucagccacucuuaugccggcgaugcugccaaucauugcgggaccguugcuaacggagugcugcaaacguuuaugcgcauggccuggggcggguccuacaucgcgcuugacagcggaagaggcaacugggauuguauuaugacaucuuaccaguaucugaucauccagaauaccacaugggacgaucacugccaguucucccggcccagcccuauuggguaccucggacugcuuucucaacgcaccagagacgucuauaucucccggcgccugcucggcaccuuuacauggacgcugagcgauuccgagggcaaggacacccccgggggauacugucugacaagauggaugcucauugaagccgagcugaaaugcuucggcaacaccgcuguggccaaguguaaugagaaacaugaugaagaguuuugcgacaugcuucggcuguucgauuuuaacaagcaggcuauccagcgccucaaagccgaagcgcagaugucuauucaacugaucaauaaggccgugaacgcucuuaucaaugaccagcugauuaugaagaaccaccucagagacaucauggggauuccuuauugcaauuacagcaaauauugguaccugaacaauacagccaccggaaagacgucccugcccaaauguuggcucaucagcaacggcucuuaccugaaugagacacacuucuccgaugacauugaacaggaggcugauaacaugaucaccgagaugcuucaaaaggaauauauggagcggcaggggaaaaccccucugggacucgucgaccuguucguuuuuagcacaucuuucuaccugaucagcauuuuucuucaucucgugaagaucccgugaggacuaguuauaagacugacuagcccgaugggccucccaacgggcccuccuccccuccuugcaccgagauuaaucaaaggcucuuuucagagccaccaaaaaaaaaaaaaaaaaaaaaaaaaaaaaaaaaaaaaaaaaaaaaaaaaaaaaaaaaaaaaaaaaaaaaaaaaaaaaaaaaaaaaaaaaaaaaaaaaaaaa

SEQ ID NO: 43165 - RNA, 1575 nt, Artificial Sequence
  mRNA product Design i-3 (hSL-A100) comprising derived and/or modified sequence from LASV(G3010-SLE-2013;Clade IV)__AIT17344__GPCmut13 (opt5)
aggagaaagcuuaccaugggccagaucgugaccuucuuucaagaggucccccacguuauugaagaggugaugaacaucgugcugauugcccucagcauccuggcuguccuuaaggggcuguacaauuucgccacaugcggacucgugggccugguuacguuucuucugcucugugggagauccugcaccacaucucuguauaaaggaguguacgaacugcagacccucgagcugaacauggaaacacuuaauaugaccaugccucugagcuguacaaagaacaauucccaucacuauauuauggucggcaacgagaccgggcucgagcugacgcuuaccaauacaucuaucaucaaccauaaauucugcaaucugagcgacgcgcacaagaaaaaccucuacaaucaugcucugauguccauuaucucuaccuuucaccugagcauuccgaacuucaaucaguaugaagccauguccugugauuuuaacggaggcaagaucagcgugcaguacaaucucucucacuccuaugccggcgacgcugccagccauugcgggacaguugcuaacggagugcugcaaaccuucaugcggauggccuggggcgggucuuacauugcgcuugauuccggauacggcaagugggacuguaucaugacgagcuaucaguaccugauuauccagaacacaaccugggaggaucacugccaguuuucucgccccuccccuaucggguaucucggacugcuuagccaaagaacacgggacauuuacaucucccgcagacugcucggcaccuucaccuggacacugucugauagcgaaggcaaagacacgcccgggggauauugucugacccgguggaugcucauugaggccgagcugaagugcuuuggcaauacagcugucgccaaauguaacgaaaagcaugaugaggaguucugcgacaugcuucgccuguuugauuucaauaaacaggcuauccagagacucaagaccgaagcccagauguccauucaacugaucaacaaggcggugaaugcccuuaucaacgaccagcugauuaugaaaaaucaccuccgggauaucauggggauuccuuacugcaacuauagcaaguacugguaccugaaucacacaaccacgggaaaaacaucucugcccaaguguuggcucguguccaacggcagcuaucugaaugaaacccauuucucugacgacaucgagcagcaagcugauaacaugauuaccgagaugcuucagaaagaauacauggagcgccaggggaagacaccucugggacucgucgaccuguuuguuuucagcaccuccuuuuaucugaucucuaucuuccuucaccucgugaaaauuccgugaggacuaguuauaagacugacuagcccgaugggccucccaacgggcccuccuccccuccuugcaccgagauuaaucaaaggcucuuuucagagccaccaaaaaaaaaaaaaaaaaaaaaaaaaaaaaaaaaaaaaaaaaaaaaaaaaaaaaaaaaaaaaaaaaaaaaaaaaaaaaaaaaaaaaaaaaaaaaaaaaaaaa

SEQ ID NO: 43166 - RNA, 1575 nt, Artificial Sequence
  mRNA product Design i-3 (hSL-A100) comprising derived and/or modified sequence from LASV(G502-SLE-2009;Clade IV)__AIT17126__GPCmut13 (opt5)
aggagaaagcuuaccaugggccagaucgugaccuucuuucaagaggucccccacguuauugaagaggugaugaacaucgugcugauugcccucagcauccuggcuguccuuaaggggcuguacaauuucgccacaugcggacucgugggccugcuuacguuucugcuccugugugggagauccugcaccacaggacuguauaaaggcguuuacgaacuccagacccuggagcuuaacauggaaacacugaauaugaccaugccucucucuuguacaaagaacaauagccaucacuauauuaugguggggaacgagaccggacuggagcuuacgcugaccaauacauccaucaucaaccauaaauucugcaaucucucugacgcgcacaagaaaaaccuguacgaucaugcucugaugagcauuaucuccaccuuucaccucucuauuccgaauuucaaccaguaugaagccaugagcugugacuuuaauggcggcaagaucuccguccaguacaaccugagccacucuuaugccggggaugcugccgaccauugcggaacaguggcuaauggcguucuucaaaccuucaugcggauggccuggggaggguccuacauugcgcuggauagcggccgcgggagaugggacuguaucaugacgucuuaccaguaucucauuauccagaacacaaccugggaggaucacugccaguuuucccggcccagcccuaucggauaccugggccuucugucucaacgcacaagagacauuuauaucucccggcgccuccugggcaccuucaccuggacacugagcgauuccgaagggaaggacacgcccggaggcuacugucucaccagauggaugcugauugaggccgagcuuaaaugcuuugggaacacagcuguggccaaguguaaugaaaaacaugaugaggaguucugcgacaugcugcggcucuuugauuucaacaagcaggcuauccagcgccugaaagccgaagcgcagaugucuauucaacuuaucaauaaggccgucaacgcucugaucaaugaccagcucgugaugaagaaccaccugagagacauuaugggaaucccuuauugcaauuacagccgguauugguaccugaaccacaccacaaccggccgcacgucccuccccaaauguuggcuggugagcaaugggucuuaccuuaacgaaacacauuucuccgaugacauugagcagcaagccgauaauaugaucaccgagaugcugcagaaggaauauauggagagacagggaaaaaccccucucggccuggucgaccuguuuguuuucagcacaucuuuuuaccuuauuagcaucuuccuccaccuggugaagaucccgugaggacuaguuauaagacugacuagcccgaugggccucccaacgggcccuccuccccuccuugcaccgagauuaaucaaaggcucuuuucagagccaccaaaaaaaaaaaaaaaaaaaaaaaaaaaaaaaaaaaaaaaaaaaaaaaaaaaaaaaaaaaaaaaaaaaaaaaaaaaaaaaaaaaaaaaaaaaaaaaaaaaaa

SEQ ID NO: 43167 - RNA, 1575 nt, Artificial Sequence
  mRNA product Design i-3 (hSL-A100) comprising derived and/or modified sequence from LASV(G733-SLE-2010;Clade IV)__AIT17154__GPCmut13 (opt5)
aggagaaagcuuaccaugggccagaucgugaccuucuuucaagaggucccccacguuauugaagaggugaugaacaucgugcugauugcccucagcauccuggcuguccuuaaggggcuguacaauuucgccacaugcggaauugugggccucguuuccuuucugcuucugugugggagaucuugcacgaccagccucuauaaaggaguguacgaacugcagacacuggagcucaacauggaaacccugaauaugacaaugccucuuuccuguaccaagaacaauucucaucacuauaucauggucggcaacgagacagggcuggagcucacccugacgaauaccagcaucauuaaccauaaauucugcaaucuuuccgacgcgcacaagaaaaaccuguacgaucaugcucucaugucuaucauuagcacauuucaccuguccaucccgaauuucaaccaguaugaagccaugagcugugacuuuaauggaggcaagauuucugugcaguacaaccugucccacagcuaugccggcgaugcugccaaucauugcgggaccaucgcuaacggaguucuccaaacauucaugcggauggccuggggcgggucuuacauugcgcuggacuccggacgcgauagaugggacuguaucaugaccagcuaccaguaucuuaucauucagaacacgacaugggaggaucacugccaguuuucucggcccuccccuaucggcuaccuggggcuccugagccaacgcaccagagacauuuauaucucccggcgccuucugggaacauucaccuggacccucucugauagcgaaggcaaggacacacccggcggguacugucugacgagauggaugcugauugaggccgagcucaaaugcuuuggaaauaccgcuguggccaaguguaacgaaaaacaugaugaggaguucugcgacaugcugcggcuuuuugauuucaauaagcaggcuauccagcgccugaaagccgaagcgcagauguccauccaacucauuaacaaggccgucaaugcucugaucaacgaccagcuuauuaugaagaaucaccugagagacaucaugggcauuccuuauugcaacuacagcaaauauugguaccucaaucacacaaccacagggaagaccucucugcccaaauguuggcugguguccaacggaagcuaccucaaugaaacgcauuucucugaugacaucgagcagcaagccgauaacaugaucacagagaugcugcagaaggaauauauggagcggcagggcaaaaccccucuugggcugguggaccucuuugucuucagcaccuccuuuuaccugauuucuaucuuccugcaccuuguuaagauuccgugaggacuaguuauaagacugacuagcccgaugggccucccaacgggcccuccuccccuccuugcaccgagauuaaucaaaggcucuuuucagagccaccaaaaaaaaaaaaaaaaaaaaaaaaaaaaaaaaaaaaaaaaaaaaaaaaaaaaaaaaaaaaaaaaaaaaaaaaaaaaaaaaaaaaaaaaaaaaaaaaaaaaa

SEQ ID NO: 43168 - RNA, 1575 nt, Artificial Sequence
  mRNA product Design i-3 (hSL-A100) comprising derived and/or modified sequence from MOPV/LASV reassortant(IGS-1;Clade IV)__AFY05576__GPCmut13 (opt5)
aggagaaagcuuaccaugggccagaucgugaccuucuuucaagaggucccccacguuauugaagaggugaugaacaucgugcugauugcccucagcguccuggcugugcuuaaggggcuguacaauuucgccacaugcggacucguuggccuggugacguuucuucugcucugugggagauccugcaccacaucucuguauaaaggagucuacgaacugcagacccucgagcugaacauggaaacacuuaauaugaccaugccucugagcuguacaaagaacaauucccaucacuauaucauggugggcaacgagaccgggcucgagcugacgcuuaccaauacaucuauuaucaaccauaaauucugcaaucugagcgacgcgcacaagaaaaaccucuacgaucaugcucugauguccaucauuucuaccuuucaccugagcaucccgaauuucaaccaguaugaagccauguccugugacuuuaauggaggcaagauuagcguucaguacaaccucucucacuccuaugccggcgaugcugccaaucauugcgggacaguggcuaacggaguccugcaaaccuucaugcggauggccuggggcgggagcuacaucgcgcuugacucuggacgcggcaacugggauuguauuaugacguccuaccaguaucugaucauucagaauacaaccugggaggaccacugccaguuuagcagacccucuccuaucggguaccucggacugcuuucccaacggacacgcgauaucuauauuagcagacggcugcucggcaccuucaccuggacacuguccgacucugaaggcgaggauacgcccgggggauacugucugacccgcuggaugcucaucgaggccgaacugaagugcuuuggcaacacagcuguggccaaauguaaugagaagcaugacgaagaguucugcgauaugcuuagacuguuugacuucaacaaacaggcuauucagcggcucaaggccgaagcgcagaugagcauccaacugauuaauaaagccgugaacgcucuuaucaaugaucagcugaucaugaagaaccaccuccgcgacauuauggggaucccuuauugcaauuacuccaaguauugguaccugaaccacaccacaaccggaagaacgagccugcccaaauguuggcucgucucuaauggcuccuaccugaacgagacacauuucagcgacgauauugagcagcaagccgacaauaugaucaccgaaaugcuucagaaggaguauauggaacggcaggggaaaaccccucugggacucguugaucuguuuguguucucuaccagcuuuuaccugauuuccaucuuccuucaccucgugaagaucccgugaggacuaguuauaagacugacuagcccgaugggccucccaacgggcccuccuccccuccuugcaccgagauuaaucaaaggcucuuuucagagccaccaaaaaaaaaaaaaaaaaaaaaaaaaaaaaaaaaaaaaaaaaaaaaaaaaaaaaaaaaaaaaaaaaaaaaaaaaaaaaaaaaaaaaaaaaaaaaaaaaaaaa

SEQ ID NO: 43169 - RNA, 1575 nt, Artificial Sequence
  mRNA product Design i-3 (hSL-A100) comprising derived and/or modified sequence from LASV(LM765-SLE-2012;Clade IV)__AIT17814__GPCmut13 (opt5)
aggagaaagcuuaccaugggccagaucgugaccuucuuucaagaggucccccacguuauugaagaggugaugaacaucgugcugauugcccucagcauccuggcuguccuuaaggggcuguacaauuucgccacaugcggacucgugggccugguuacguuucuucugcucugugggagauccugcaccacaucucuguauaaaggaguguacgaacugcagacccucgagcugaacauggaaacacuuaauaugaccaugccucugagcuguacaaagaacaauucccaucacuauauuauggucggcaacgagaccgggcucgagcugacgcuuaccaauacaucuaucaucgaccauaaauucugcaaccugagcgaugcgcaccggaagaaucucuacgaccaugcucugauguccauuaucucuaccuuucaccugagcauuccgaacuucaaucaguaugaagccauguccugugauuuuaacggaggcaaaaucagcgugcaguacaaucucucucacuccuaugccaaggacgcugccgaucauugcggcacaguugcuaacggggugcugcaaaccuucaugcgcauggccuggggaggcagcuacauugcgcuugacucugggagaggacggugggauuguaucaugacguccuaccaguaucugauuauccagaauacaaccugggaggaccacugccaguuuagccgccccucuccuaucggcuaccucgggcugcuuucccaaagaacacgggauauuuauaucagccgcagacugcucggaaccuucaccuggacacuguccgacucugaaggcaaggauacgcccggcggguacugucugacccgguggaugcucauugaggccgagcugaaaugcuuuggaaacacagcugucgccaaguguaacgaaaaacaugacgaggaguucugcgauaugcuucgccuguuugacuucaauaagcaggcuauccagagacucaaagccgaagcgcagaugagcauucaacugaucaacaaggccgugaaugcucuuaucaacgaccagcugauuaugaagaaucaccuccgggauaucaugggcauuccuuauugcaacuacuccaaauauugguaccugaaucacaccacaaccgggaagacgagccugcccaaauguuggcucgugucuaacggauccuaccugaaugaaacacauuucagcgacgauaucgagcagcaagccgacaacaugauuaccgagaugcuucagaaggaauauauggagcgccagggcaaaaccccucuggggcucgucgaucuguuuguuuucucuaccagcuuuuaccugaucuccaucuuccuucaccucgugaagauuccgugaggacuaguuauaagacugacuagcccgaugggccucccaacgggcccuccuccccuccuugcaccgagauuaaucaaaggcucuuuucagagccaccaaaaaaaaaaaaaaaaaaaaaaaaaaaaaaaaaaaaaaaaaaaaaaaaaaaaaaaaaaaaaaaaaaaaaaaaaaaaaaaaaaaaaaaaaaaaaaaaaaaaa

SEQ ID NO: 43170 - RNA, 1575 nt, Artificial Sequence
  mRNA product Design i-3 (hSL-A100) comprising derived and/or modified sequence from LASV(LM776-SLE-2012;Clade IV)__AIT17824__GPCmut13 (opt5)
aggagaaagcuuaccaugggccagaucgugaccuucuuucaagaggucccccacguuauugaagaggugaugaacaucgugcugauugcccucagcauccuggcuguccuuaaggggcuguacaauuucgccacaugcggacucgugggccugguuacguuucuucugcucugugggagauccugcaccacaucuguguauaaaggagucuacgaacugcagacccuggagcucaacauggaaacacugaauaugaccaugccucuuagcuguacaaagaacaauucccaucacuauauuauggugggcaacgagaccgggcuggagcucacgcugaccaauacaucuaucaucaaccauaaauucugcaaucuuagcgacgcgcacaagaaaaaccuguacgaucaugcucucauguccauuaucucuaccuuucaccugagcauuccgaauuucaaccaguaugaagccauguccugugacuuuaauggaggcaagaucagcguucaguacaaccugucucacuccuaugccggcgaugcugccaaucauugcgggacaguggcuaacggaguccuccaaaccuucaugcggauggccuggggcgggagcuacauugcgcuggacucuggacacggcaagugggauuguaucaugacguccuaccaguaucuuauuauccagaacacaaccugggaggaccauugccaguuuagccgccccucuccuaucggguaccugggacuccugucccaaagaacacgggauauuuauaucagccgcagacuucugggcaccuucaccuggacacucuccgacucugaaggcaaagauacgcccgggggauacugucugacccgguggaugcugauugaggccgagcucaagugcuuuggcaauacagcuguggccaaauguaacgaaaagcacgacgaggaguucugcgauaugcugcgccuuuuugacuucaauaaacaggcuauccagagacugaaggccgaagcgcagaugagcauucaacucaucaacaaggccgugaaugcucugaucaacgaucagcuuauuaugaaaaaucaucugcgggacaucauggggauuccuuauugcaacuacuccaaguauugguaccucaaucacaccacaaccggaaaaacgagccugcccaaguguuggcuggucucuaacggcuccuaccucaaugaaacacacuucagcgacgauaucgagcagcaagccgacaacaugauuaccgagaugcugcagaaagaauauauggagcgccaggggaagaccccucuuggacugguugaucucuuuguguucucuaccagcuuuuaccugaucuccaucuuccugcaucuugugaaaauuccgugaggacuaguuauaagacugacuagcccgaugggccucccaacgggcccuccuccccuccuugcaccgagauuaaucaaaggcucuuuucagagccaccaaaaaaaaaaaaaaaaaaaaaaaaaaaaaaaaaaaaaaaaaaaaaaaaaaaaaaaaaaaaaaaaaaaaaaaaaaaaaaaaaaaaaaaaaaaaaaaaaaaaa

SEQ ID NO: 43171 - RNA, 1575 nt, Artificial Sequence
  mRNA product Design i-3 (hSL-A100) comprising derived and/or modified sequence from LASV(Mad39;Clade IV)__ANH09722__GPCmut13 (opt5)
aggagaaagcuuaccaugggccagaucgugaccuucuuucaagaggucccccacguuauugaagaggugaugaacaucgugcugauugcccucagcauccuggcuguccuuaaggggcuguacaauguggccacaugcggacucauuggccugguuacguuccuucugcucugugggagauccugcaccacaacccuguauaaaggaguguacgaacugcaggcgcucgagcugaacauggaaacacuuaauaugaccaugccucugucuuguacaaagaacaauagccaucacuauauccgggucggcaacgagaccgggcucgagcugacgcuuaccaauacaucccugaucaaccauaaauuuugcaaucucucugacgcucacaagaaaaaccuguacgaucaugcccugaugagcauuaucuccaccuuccaccucucuauuccgaauuuuaaccaguaugaagccaugagcugugacuucaaugauggaaagaucuccgugcaguacaaccugagccacacauaugcuggcgacaccgccaaucauugcggcacgguugcuaacggggugcuucaaacauuuaugcgcauggccuggggaggcucuuacauugcgcuggauuccgggagaggaggcugggacuguaucaugaccagcuaccaguaucucauuauccagaacacaaccugggaggaucacugccaguucucucggcccuccccuaucggguaccugggacuucugagccaacgcaccagagacauuuauaucucucggcgccuccugggcacauuuacguggacccuguccgauagcgaaggcaaggacacacccgggggauacugucucaccagauggaugcugauugaggccgagcuuaaaugcuucggcaauacagcugucgccaaguguaacgaaaaacaugaugaggaauuuugcgacaugcugcgccucuucgauuuuaauaagcaggcuauccagcggcugaaagccgaggcgcagauguccauucaacuuaucaacaaggccgugaaugcucugaucaacgaccagcucauuaugaagaaucaccugagagacaucauggggauuccuuauugcaacuacucuaaauauugguaccugaaucacaccgugacgggaaagacaagccuccccaaauguuggcuggucuccaacggcagcuaccuuaaugaaacccauuucucugaugacaucgagcagcaagccgauaacaugauuaccgagaugcugcagaaggaauauauggagcggcaggggaaaacaccucucggacugguugaccuguucguguuuuccaccagcuucuaccuuaucucuaucuuucuccaccuggugaagauuccgugaggacuaguuauaagacugacuagcccgaugggccucccaacgggcccuccuccccuccuugcaccgagauuaaucaaaggcucuuuucagagccaccaaaaaaaaaaaaaaaaaaaaaaaaaaaaaaaaaaaaaaaaaaaaaaaaaaaaaaaaaaaaaaaaaaaaaaaaaaaaaaaaaaaaaaaaaaaaaaaaaaaaa

SEQ ID NO: 43172 - RNA, 1575 nt, Artificial Sequence
  mRNA product Design i-3 (hSL-A100) comprising derived and/or modified sequence from LASV(Z0947-SLE-2011;Clade IV)__AIT17840__GPCmut13 (opt5)
aggagaaagcuuaccaugggccagaucgugaccuucuuucaagaggucccccacguuauugaagaggugaugaacaucgugcugauugcccucagcauccuggcuguccuuaaggggcuguacaauuucgccacaugcggacucgugggccugguuacguuucuucugcucugugggagauccugcaccauuucucuguauaaaggaguguacgaacugcagacacucgagcugaacauggaaacccuuaauaugacaaugccucugagcuguaccaagaacaauucccaucacuauaucauggucggcaacgagacagggcucgagcugacccuuacgaauaccucuaucauuaaccauaaauucugcaaucugagcgacgcgcacaagaaaaaccucuacgaucaugcucugauguccaucauuucuacauuucaccugagcaucccgaauuucaaccaguaugaagccauguccugugacuuuaauggaggcaagauuagcgugcaguacaaccucucucacuccuaugccggcgaugcugccaaucauugcgggaccguugcuaacggagugcugcaaacauucaugcggauggccuggggcgggagcuacaucgcgcuugacucuggacgcgauagaugggacuguauuaugaccuccuaccaguaucugaucauccagaacacgacaugggaggaucacugccaguuuagccggcccucuccuauuggcuaccucgggcugcuuucccaacgcaccagagacaucuauauuagccggcgccugcucggaacauucaccuggacccuguccgauucugaaggcaaggacacacccggcggguacugucugacgagauggaugcucaucgaggccgagcugaaaugcuuuggaaauaccgcugucgccaaguguaacgaaaaacaugaugaggaguucugcgacaugcuucggcuguuugauuucaauaagcaggcuauucagcgccucaaagccgaagcgcagaugagcauccaacugaucaacaaggccgugaaugcucuuauuaacgaccagcugaucaugaagaaucaccucagagacauuaugggcaucccuuauugcaacuacuccaaauauugguaccugaaucacacaaccacagggaagaccagccugcccaaauguuggcucgugucuaacggauccuaccugaaugaaacgcauuucagcgaugacauugagcagcaagccgauaacaugaucacagagaugcuucagaaggaauauauggagcggcagggcaaaaccccucuggggcucgucgaccuguuuguuuucucuaccagcuuuuaccugaucuccauuuuccuucaccucgugaagaucccgugaggacuaguuauaagacugacuagcccgaugggccucccaacgggcccuccuccccuccuugcaccgagauuaaucaaaggcucuuuucagagccaccaaaaaaaaaaaaaaaaaaaaaaaaaaaaaaaaaaaaaaaaaaaaaaaaaaaaaaaaaaaaaaaaaaaaaaaaaaaaaaaaaaaaaaaaaaaaaaaaaaaaa

SEQ ID NO: 43173 - RNA, 1551 nt, Artificial Sequence
  mRNA product Design i-3 (A100) comprising derived and/or modified sequence from LASV(Josiah;Clade IV)__NP_694870__GPCmut13 (opt1)
aggagaaagcuuaccaugggccagaucgugaccuucuuccaggaggucccccacgugaucgaggaggugaugaacaucguccugaucgcccucagcgugcuggccgugcugaaggggcucuacaacuucgcgaccugcggccuggucgggcuggugacguuccuccugcugugcggccgcuccugcaccaccagccucuacaaggggguguacgagcugcagacccuggagcucaacauggagacgcugaacaugaccaugccgcuguccugcaccaagaacaacagccaccacuacaucauggucggcaacgagaccggccucgagcugacgcugaccaacaccuccaucaucaaccacaaguucugcaaccucagcgacgcccacaagaagaaccuguacgaccacgcccugauguccaucaucagcaccuuccaccucuccauccccaacuucaaccaguacgaggccaugagcugcgacuucaacgggggcaagaucuccgugcaguacaaccugagccacuccuacgccggggacgcggccaaccacugcggcacgguggccaacgggguccugcagaccuucaugcggauggccuggggcggcagcuacaucgcgcucgacuccgggcgcggcaacugggacugcaucaugaccagcuaccaguaccugaucauccagaacaccacgugggaggaccacugccaguucucccggcccagccccaucggguaccugggccuccugucccagcgcacccgggacaucuacaucagccgccggcugcucggcaccuucaccuggacgcugagcgacuccgaggggaaggacaccccgggcggguacugccugacccgcuggaugcucaucgaggccgagcugaagugcuucggcaacaccgccguggccaagugcaacgagaagcacgacgaggaguucugcgacaugcugcggcuguucgacuucaacaagcaggccauccagcgccugaaggcggaggcccagaugagcauccagcugaucaacaaggccgugaacgcccucaucaacgaccagcugaucaugaagaaccaccuccgggacaucauggggauccccuacugcaacuacuccaaguacugguaccucaaccacacgaccaccggccgcaccagccugcccaagugcuggcuggucuccaacggcagcuaccucaacgagacgcacuucuccgacgacaucgagcagcaggccgacaacaugaucaccgagaugcugcagaaggaguacauggagcggcaggggaagacgccccugggccucguggaccuguucguguucagcaccuccuucuaccugaucagcaucuuccugcaccucgucaagaucccgugaggacuaguuauaagacugacuagcccgaugggccucccaacgggcccuccuccccuccuugcaccgagauuaauaaaaaaaaaaaaaaaaaaaaaaaaaaaaaaaaaaaaaaaaaaaaaaaaaaaaaaaaaaaaaaaaaaaaaaaaaaaaaaaaaaaaaaaaaaaaaaaaaaaa

SEQ ID NO: 43174 - RNA, 1548 nt, Artificial Sequence
  mRNA product Design i-3 (A100) comprising derived and/or modified sequence from LASV(LP;Clade I)__AAF86701__GPCmut13 (opt1)
aggagaaagcuuaccaugggccagaucaucaccuucuuccaggaggugccccacgucaucgaggaggugaugaacaucgugcugaucgcccucagccugcuggccauccucaaggggcuguacaacaucgcgaccugcggcaucaucgggcuggucgccuuccucuuccugugcggcaaguccugcagccugacgcucaagggcggguacgagcugcagacccuggagcucaacauggagacccugaacaugaccaugccgcuguccugcacgaagaacagcucccaccacuacauccgcgugggcaacgagaccgggcucgagcugacccugaccaacacgagcaucaucaaccacaaguucugcaaccucuccgacgcccacaagaagaaccuguacgaccacgcccugaugagcaucaucuccaccuuccaccucagcauccccaacuucaaccaguacgaggccauguccugcgacuucaacggcgggaagaucagcgugcaguacaaccugucccacagcuacgcgggcgacgccgccgagcacugcgggaccgucgccaacggcgugcugcagaccuucaugcggauggcguggggcgggcgcuacaucgcccucgacuccggcaaggggaacugggacugcaucaugacgagcuaccaguaccugaucauccagaacaccaccugggaggaccacugccaguucucccggcccagccccaucggcuaccugggccuccugucccagcgcacccgggacaucuacaucagccgccggcugcucgggacguucaccuggacccugagcgacuccgagggcaacgagacccccgggggcuacugccugacgcgcuggaugcucaucgaggccgagcugaagugcuucgggaacaccgccguggccaagugcaacgagaagcacgacgaggaguucugcgacaugcugcggcuguucgacuucaacaagcaggcgauccgccggcugaaggccgaggcccagaugagcauccagcugaucaacaaggccgucaacgcccucaucaacgaccagcugaucaugaagaaccaccuccgcgacaucaugggcauccccuacugcaacuacuccaaguacugguaccucaaccacaccagcuccggccggaccagccugcccaagugcuggcugaucuccaacgggagcuaccucaacgagacgcaguucuccgacgacaucgagcagcaggcggacaacaugaucaccgagaugcugcagaaggaguacaucgagcgccagggcaagaccccgcuggggcucguggacaucuucaucuucagcaccuccuucuaccugaucagcaucuuccugcaccugaucaagaucccgugaggacuaguuauaagacugacuagcccgaugggccucccaacgggcccuccuccccuccuugcaccgagauuaauaaaaaaaaaaaaaaaaaaaaaaaaaaaaaaaaaaaaaaaaaaaaaaaaaaaaaaaaaaaaaaaaaaaaaaaaaaaaaaaaaaaaaaaaaaaaaaaaaaaa

SEQ ID NO: 43175 - RNA, 1548 nt, Artificial Sequence
  mRNA product Design i-3 (A100) comprising derived and/or modified sequence from LASV(803213;Clade II)__AAF86703__GPCmut13 (opt1)
aggagaaagcuuaccaugggccagaucaucaccuucuuccaggaggugccccacgucaucgaggaggugaugaacaucgugcugaucgcccucagccugcuggccauccucaaggggaucuacaacgucgcgaccugcggccuguucgggcugaucuccuuccuccugcugugcggccgcagcugcuccgugacguacaaggggguguacgagcuccagacccuggagcugaacauggccaaccucaacaugaccaugccgcugagcugcaccaagaacaacucccaccacuacaucauggucggcaacgagacgggccuggagcucacccugaccaacaccagcaucaucaaccacaaguucugcaaccuguccgacgcccacaagaagaaccucuacgaccacgcccugaugagcaucaucuccacguuccaccugagcauccccaacuucaaccaguacgaggccauguccugcgacuucaacgggggcaagaucagcgugcaguacaaccucucccacagcuucgcgguggacgccgccaaccacugcgggaccaucgccaacggcguccugcagaccuucaugcggauggcguggggcggguccuacaucgcccuggacagcggcaaggggaacugggacugcaucaugaccuccuaccaguaccucaucauccagaacacgaccugggaggaccacugccaguucagccgccccucccccaucggcuaccuggggcugcucagccagcggacccgcgacaucuacaucagccggcgccugcugggcaccuucacguggacccucuccgacagcgagggcaacgaggcccccgggggcuacugccugacccgguggaugcugaucgaggccgagcucaagugcuucgggaacaccgccguggcgaagugcaacgagaagcacgacgaggaguucugcgacaugcugcgccuguucgacuucaacaagcaggccaucaagcggcucaagacggaggcccagauguccauccagcugaucaacaaggccgugaacgcccugaucaacgaccagcucaucaugaagaaccaccuccgcgacaucaugggcauccccuacugcaacuacagccgguacugguaccugaaccacaccgucaccgggaagaccucccugccccgcugcuggcuggugagcaacggcuccuaccugaacgagacgcacuucagcgacgacaucgagcagcaggcggacaacaugaucaccgagaugcuccagaaggaguacauggaccggcagggcaagaccccgcuggggcugguggaccucuucgucuucuccaccagcuucuaccugaucuccaucuuccugcaccuggugaagaucccgugaggacuaguuauaagacugacuagcccgaugggccucccaacgggcccuccuccccuccuugcaccgagauuaauaaaaaaaaaaaaaaaaaaaaaaaaaaaaaaaaaaaaaaaaaaaaaaaaaaaaaaaaaaaaaaaaaaaaaaaaaaaaaaaaaaaaaaaaaaaaaaaaaaaa

SEQ ID NO: 43176 - RNA, 1548 nt, Artificial Sequence
  mRNA product Design i-3 (A100) comprising derived and/or modified sequence from LASV(GA391;Clade III)__CAA36645__GPCmut13 (opt1)
aggagaaagcuuaccaugggccagaucgugaccuucuuccaggaggucccccacgugaucgaggaggugaugaacaucguccugaucgcccucagcauccuggccauccugaaggggcucuacaacguggcgaccugcggccugaucgggcuggugacguuccuccugcuguccggccgcagcugcucccucaucuacaaggggaccuacgagcugcagacccuggagcucaacauggagacccugaacaugacgaugccgcugagcugcaccaagaacaacucccaccacuacauccgggucggcaacgagaccggccucgagcugacccugacgaacaccagcauccucaaccacaaguucugcaaccuguccgacgcccacaagcgcaaccuguacgaccacagccucauguccaucaucagcaccuuccaccuguccauccccaacuucaaccaguacgaggccaugagcugcgacuucaacgggggcaagaucaccgugcaguacaaccugucccacagcuucgccguggacgccgcggggcacugcggcacgcucgccaacgggguccugcagaccuucaugcggauggccuggggcggcuccuacaucgcccuggacagcgggcgcggcaacugggacugcaucaugaccuccuaccaguaccucaucauccagaacaccacgugggacgaccacugccaguucagccggcccucccccaucggguaccugggccugcucagccagcgcacccgggacaucuacaucagccgccggcugcugggcaccuucaccuggacgcucuccgacagcgaggggaacgagaccccgggcggguacugccugacccgcuggaugcugaucgaggcggagcucaagugcuucggcaacaccgccguggccaagugcaacgagaagcacgacgaggaguucugcgacaugcugcggcuguucgacuucaacaagcaggccauccgccggcucaagacggaggcccagauguccauccagcugaucaacaaggcggugaacgcccugaucaacgaccagcucaucaugaagaaccaccuccgcgacaucauggggauccccuacugcaacuacagccgguacugguaccugaaccacaccuccaccggcaagaccagccugccccgcugcuggcugaucuccaacggcagcuaccugaacgagacgaaguucuccgacgacaucgagcagcaggccgacaacaugaucaccgagaugcuccagaaggaguacaucgaccggcaggggaagacgccccugggccuggucgaccuguucguguucagcaccuccuucuaccucaucagcaucuuccugcaccuggugaagaucccgugaggacuaguuauaagacugacuagcccgaugggccucccaacgggcccuccuccccuccuugcaccgagauuaauaaaaaaaaaaaaaaaaaaaaaaaaaaaaaaaaaaaaaaaaaaaaaaaaaaaaaaaaaaaaaaaaaaaaaaaaaaaaaaaaaaaaaaaaaaaaaaaaaaaa

SEQ ID NO: 43177 - RNA, 1551 nt, Artificial Sequence
  mRNA product Design i-3 (A100) comprising derived and/or modified sequence from LASV(AV;Clade V)__CCA30314__GPCmut13 (opt1)
aggagaaagcuuaccaugggccagaucgugaccuucuuccaggaggucccccacgugaucgaggaggugaugaacaucguccugaucgcccucagcauccuggccgugcugaaggggcucuacaacaucgcgaccugcggccugaucgggcugaucacguuccuccugcugugcggccgcuccugcagcuccaaccucuacaaggggguguacgagcugcagagccuggaccucaacauggagacccugaacaugaccaugccgcuguccugcaccaagaacaacagccaccacuacauccgggucggcaacgacacgggccucgagcugacccugaccaacaccuccauccucaaccacaaguucugcaaccugagcgacgcccacaagaaggaccuguacgaccacgcccucauguccaucaucagcacguuccaccuguccauccccaacuucaaccaguacgaggccaugagcugcgacuucaacgggggcaagaucuccgugcaguacaaccugagccacuccuacgccaucgacgcggccaaccacugcgggaccguggccaacggcauccuccagaccuucaugcgcauggccuggggcgggagcuacaucgcgcuggacuccggccgggggaacugggacugcaucaugaccagcuaccaguaccugaucauccagaacacgaccugggagaaccacugccaguucucccgccccagccccaucggcuaccucgggcugcugagccagcggacccgcgacaucuacaucucccggcgccuccugggcaccuucacguggacccugagcgacuccgagggcaacgccacccccgggggcuacugccucacccgguggaugcugaucgaggccgagcugaagugcuucgggaacacggccgucgccaagugcaacgagaagcacgacgaggaguucugcgacaugcuccgccuguucgacuucaacaagcaggcgaucagccggcugaaguccgaggcccagaugagcauccagcucaucaacaaggccgugaacgcccugaucaacgaccagcugaucaugaagaaccaccuccgcgacaucaugggcauccccuacugcaacuacuccaaguacugguaccugaaccacaccaucaccgggaagaccagccugcccaagugcuggcucguguccaacggcagcuaccugaacgagacgcacuucuccgacgacaucgagcagcaggccgacaacaugaucaccgagaugcugcagaaggaguacauggagcggcagggcaagaccccgcucgggcuggucgaccuguucguguucagcaccuccuucuaccugaucagcaucuuccuccgccuggugaagaucccgugaggacuaguuauaagacugacuagcccgaugggccucccaacgggcccuccuccccuccuugcaccgagauuaauaaaaaaaaaaaaaaaaaaaaaaaaaaaaaaaaaaaaaaaaaaaaaaaaaaaaaaaaaaaaaaaaaaaaaaaaaaaaaaaaaaaaaaaaaaaaaaaaaaaa

SEQ ID NO: 43178 - RNA, 1548 nt, Artificial Sequence
  mRNA product Design i-3 (A100) comprising derived and/or modified sequence from LASV(Togo/2016/7082;Clade VI)__AMR44577__GPCmut13 (opt1)
aggagaaagcuuaccaugggccagaucaucaccuucuuccaggaggugccccacgucaucgaggaggugaugaacaucgugcugaucgcccucagccugcuggccauccucaagggggucuacaacguggcgaccugcggcaucaucgggcuggugacguuccuguuccucugcggccgcuccugcagccugaucuacaagggguccuacgagcugcagacccucgagcugaacauggagacccugaacaugaccaugccgcucagcugcacgaagaacuccagccaccacuacauccgggucggcaacgagaccggccuggagcugacccucaccaacacguccaucaucaaccacaaguucugcaaccugagcgacgcccacaagcgcaaccuguacgaccacgcccucauguccauccugagcaccuuccaccuguccauccccaacuucaaccaguacgaggccaugagcugcgacuucaacgggggcaagaucuccgugcaguacaaccucagccacgccuacgcgguggacgccgccgagcacugcgggaccgucgccaacggcgugcugcagaccuucaugcggauggcguggggcggguccuacaucgcccuggacagcggccgcgggaacugggacugcaucaugacguccuaccaguaccucaucauccagaacaccaccugggaggaccacugccaguucagccggcccucccccaucggcuaccuggggcugcucagccagcgcacccgggacaucuacaucagccgccggcugcugggcacguucaccuggacccucuccgacagcgagggcaacgagacccccgggggcuacugccugacgcgcuggaugcugaucgaggccgagcucaagugcuucgggaacaccgccguggccaagugcaacgagaagcacgacgaggaguucugcgacaugcugcggcuguucgacuucaacaagcaggcgauccagcgccucaaguccgaggcccagaugagcauccagcugaucaacaaggccgucaacgcccugaucaacgaccagcucaucaugaagaaccaccuccgggacaugaugggcauccccuacugcaacuacuccaaguacugguaccugaaccacaccagcuccgggcgcaccagccugcccaagugcuggcugguguccaacggcagcuaccugaacgagacgcacuucuccgacgacaucgagcagcaggccgacaacaugaucaccgagaugcuccagaaggaguacaucgaccggcagggcaagaccccgcuggggcugguggaccucuucgucuucagcaccuccuucuaccugaucagcaucuuccugcaccugaucaagaucccgugaggacuaguuauaagacugacuagcccgaugggccucccaacgggcccuccuccccuccuugcaccgagauuaauaaaaaaaaaaaaaaaaaaaaaaaaaaaaaaaaaaaaaaaaaaaaaaaaaaaaaaaaaaaaaaaaaaaaaaaaaaaaaaaaaaaaaaaaaaaaaaaaaaaa

SEQ ID NO: 43179 - RNA, 1548 nt, Artificial Sequence
  mRNA product Design i-3 (A100) comprising derived and/or modified sequence from LASV(KAK-428;Clade n.d. (VII))__ANH09740__GPCmut13 (opt1)
aggagaaagcuuaccaugggccagaucgugaccuucuuccaggaggucccccacgugaucgaggaggugaugaacaucguccugaucgcccucagccugcuggccauccucaaggggcuguacaacuucgcgaccugcggcgugaucgggcugaucacguuccuccugcugugcggccgcuccugcagcgccaccuacaaggggcaguacgagcuccagacccuggagcugaacauggagucccucaacaugaccaugccgcugagcugcacgaagaacaacucccaccacuacauccgggccggcaacaacaccggccuggagcucacccugaccaacacgagcaucaucucccacaaguucugcaaccugagcgacgcccacaagaagaaccucuacgaccacacccugauguccaucaucaccaccuuccaccugagcauccccaacuucaaccaguacgaggccauguccugcgacuucaacgggggcaagaucagcauccaguacaaccucucccacagcuacgcgggggacgccgcccagcacugcggcacgguggccaacgggguccugcagaccuucaugcgcauggcguggggcggcuccuaccuggcccucgacagcgggcggcgcggcugggacugcaucaucuccagcuaccaguaccugaucauccagaacaccaccugggacgaccacugccaguucucccggcccagccccaucggguaccugggcuucgugagccagaagacgcgcgacaucuacaucucccggcgccuccugggcaccuucaccuggacccugagcgacuccgaggggcacgacaugccgggcggguacugccucacgcgguggaugcugaucgaggccgaccugaagugcuucggcaacaccgccguggccaagugcaacgagaagcacgacgaggaguucugcgacauguggcgccucuucgacuucaacaagcaggcgauccagcggcugaaggccgaggcccagaugaacauccagcugaucaacaaggccgucaacgcccucaucaacgaccagcugaugaugaagaaccaccuccgcgacaucauggggauccccuacugcaacuacagcaaguucugguaccugaacaacaccaccacgggccggaccucccugccccgcugcuggcugaucagcaacggcuccuaccucaacgagacccacuucagcgacgacaucgagcagcaggcggacaacaugaucaccgagaugcugcagaaggaguacauggaccggcaggggaagacgccccugggccucguggaccuguucguguucuccaccagcuucuaccugaucaccaucuuccuccaccuggucaagaucccgugaggacuaguuauaagacugacuagcccgaugggccucccaacgggcccuccuccccuccuugcaccgagauuaauaaaaaaaaaaaaaaaaaaaaaaaaaaaaaaaaaaaaaaaaaaaaaaaaaaaaaaaaaaaaaaaaaaaaaaaaaaaaaaaaaaaaaaaaaaaaaaaaaaaa

SEQ ID NO: 43180 - RNA, 1548 nt, Artificial Sequence; identical to SEQ ID NO: 43174
  mRNA product Design i-3 (A100) comprising derived and/or modified sequence from LASV(Pinneo-NIG-1969;Clade I)__AIT17836__GPCmut13 (opt1)

SEQ ID NO: 43181 - RNA, 1548 nt, Artificial Sequence
  mRNA product Design i-3 (A100) comprising derived and/or modified sequence from LASV(ISTH0009-NIG-2011;Clade II)__AIT17404__GPCmut13 (opt1)
aggagaaagcuuaccaugggccagaucaucaccuucuuccaggaggugccccacgucaucgaggaggugaugaacaucgugcugaucgcccucagccugcuggccauccucaaggggaucuacaacgucgcgaccugcggccuguucgggcugguguccuuccuccugcugugcggccgcagcugcuccacgaccuacaaggggguguacgagcuccagacccuggagcuggacauggccagccucaacaugaccaugccgcuguccugcacgaagaacaacagccaccacuacaucauggucggcaacgagaccggccuggagcucacccugaccaacacguccaucaucaaccacaaguucugcaaccugagcgacgcccacaagaagaaccucuacgaccacgcccugauguccaucaucagcaccuuccaccuguccauccccaacuucaaccaguacgaggccaugagcugcgacuucaacgggggcaagaucuccgugcaguacaaccucagccacgcguacgccguggacgccgccaaccacugcgggaccaucgcgaacggcguccugcagaccuucaugcggauggccuggggcggguccuacaucgcccuggacagcggcaagggguccugggacugcaucaugacgagcuaccaguaccucaucauccagaacaccaccugggaggaccacugccaguucucccgccccagccccaucggcuaccuggggcugcucagccagcggacccgcgacaucuacaucucccggcgccugcugggcacguucaccuggacccucagcgacuccgagggcaacgagacccccgggggcuacugccugacgcgguggaugcugaucgaggccgagcucaagugcuucgggaacaccgccguggcgaagugcaacgagaagcacgacgaggaguucugcgacaugcugcgccuguucgacuucaacaagcaggccauccggcgccucaagaccgaggcccagaugagcauccagcugaucaacaaggccgugaacgcccugaucaacgaccagcucaucaugaagaaccaccuccgggacaucaugggcaucccguacugcaacuacuccaaguacugguaccugaaccacaccgucacggggaagaccagccugccccgcugcuggcugguguccaacggcagcuaccugaacgagacccacuucuccgacgacaucgagcagcaggcggacaacaugaucaccgagcuccugcagaaggaguacauggaccggcagggcaagacgccccuggggcucguggaccuguucgucuucagcaccuccuucuaccugaucagcaucuuccugcaccucaucaagaucccgugaggacuaguuauaagacugacuagcccgaugggccucccaacgggcccuccuccccuccuugcaccgagauuaauaaaaaaaaaaaaaaaaaaaaaaaaaaaaaaaaaaaaaaaaaaaaaaaaaaaaaaaaaaaaaaaaaaaaaaaaaaaaaaaaaaaaaaaaaaaaaaaaaaaa

SEQ ID NO: 43182 - RNA, 1548 nt, Artificial Sequence
  mRNA product Design i-3 (A100) comprising derived and/or modified sequence from LASV(ISTH2010-NIG-2012;Clade II)__AIT17482__GPCmut13 (opt1)
aggagaaagcuuaccaugggccagaucaucaccuucuuccaggaggugccccacgucaucgaggaggugaugaacaucgugcugaucgcccucagccugcuggccauccucaaggggaucuacaacgucgcgaccugcggccuguucgggcugguguccuuccuccugcugugcggccgcagcugcuccacgaccuacaaggggguguacgagcuccagacccuggagcuggacauggccagccucaacaugaccaugccgcuguccugcacgaagaacaacagccaccacuacaucauggucggcaacgagaccggccuggagcucacccugaccaacacguccaucaucaaccacaaguucugcaaccugagcgacgcccacaagaagaaccucuacgaccacgcccugauguccaucaucagcaccuuccaccuguccauccccaacuucaaccaguacgaggccaugagcugcgacuucaacgggggcaagaucuccgugcaguacaaccucagccacgcguacgccguggacgccgccaaccacugcgggaccaucgcgaacggcguccugcagaccuucaugcggauggccuggggcggguccuacaucgcccuggacagcggcaagggguccugggacugcaucaugacgagcuaccaguaccucaucauccagaacaucaccugggaggaccacugccaguucucccgccccagccccaucggcuaccuggggcugcucagccagcggacccgcgacaucuacaucucccggcgccugcugggcaccuucacguggacccucagcgacuccgagggcaacgagacccccgggggcuacugccugacccgguggaugcugaucgaggccgagcucaagugcuucgggaacacggccguggcgaagugcaacgagaagcacgacgaggaguucugcgacaugcugcgccuguucgacuucaacaagcaggccauccggcgccucaagaccgaggcccagaugagcauccagcugaucaacaaggccgugaacgcccugaucaacgaccagcucaucaugaagaaccaccuccgggacaucaugggcauccccuacugcaacuacuccaaguacugguaccugaaccacaccgucaccgggaagacgagccugccccgcugcuggcugguguccaacggcagcuaccugaacgagacccacuucuccgacgacaucgagcagcaggcggacaacaugaucaccgagcuccugcagaaggaguacaucgaccggcagggcaagaccccgcuggggcucguggaccuguucgucuucagcacguccuucuaccugaucagcaucuuccugcaccucgugaagaucccgugaggacuaguuauaagacugacuagcccgaugggccucccaacgggcccuccuccccuccuugcaccgagauuaauaaaaaaaaaaaaaaaaaaaaaaaaaaaaaaaaaaaaaaaaaaaaaaaaaaaaaaaaaaaaaaaaaaaaaaaaaaaaaaaaaaaaaaaaaaaaaaaaaaaa

SEQ ID NO: 43183 - RNA, 1548 nt, Artificial Sequence
  mRNA product Design i-3 (A100) comprising derived and/or modified sequence from LASV(Lassa virus/H.sapiens-wt/NGA/2015/ISTH_0543;Clade II)__AVO03639__GPCmut13 (opt1)
aggagaaagcuuaccaugggccagaucaucaccuucuuccaggaggugccccacgucaucgaggaggugaugaacaucgugcugaucgcccucagccugcuggccauccucaaggggaucuacaacgucgcgaccugcggccuguucgggcugguguccuuccuccugcugugcggccgcagcugcuccacgaccuacaaggggguguacgagcuccagacccuggagcuggacauggccaaccucaacaugaccaugccgcugagcugcacgaagaacaacucccaccacuacaucauggucggcaacgagaccggccuggagcucacccugaccaacacgagcaucaucaaccacaaguucugcaaccuguccgacgcccacaagaagaaccucuacgaccacgcccugaugagcaucaucuccaccuuccaccugagcauccccaacuucaaccaguacgaggccauguccugcgacuucaacgggggcaagaucagcgugcaguacaaccucucccacaccuacgcgguggacgccgccaaccacugcgggaccaucgccaacggcguccugcagacguucaugcggauggcguggggcgggagcuacaucgcccuggacuccggcaaggggagcugggacugcaucaugaccuccuaccaguaccucgugauccagaacaccaccugggaggaccacugccaguucagccgccccucccccaucggcuaccuggggcugcucagccagcggacgcgcgacaucuacaucagccggcgccugcugggcaccuucaccuggacccucuccgacagcgagggcaacgagacgcccgggggcuacugccugacccgguggaugcugaucgaggccgagcucaagugcuucgggaacaccgccguggccaagugcaacgagaagcacgacgaggaguucugcgacaugcugcgccuguucgacuucaacaagcaggcgauccggcgccucaagaccgaggcccagauguccauccagcugaucaacaaggccgucaacgcccugaucaacgaccagcucaucaugaagaaccaccuccgggacaucaugggcauccccuacugcaacuacagcaaguacugguaccugaaccacacggugaccgggaagaccucccugccccgcugcuggcuggugagcaacggcuccuaccugaacgagacccacuucagcgacgacaucgagcagcaggccgacaacaugaucacggagcuccugcagaaggaguacaucgaccggcagggcaagaccccgcuggggcucgucgaccuguucguguucuccaccagcuucuaccugaucuccaucuuccugcaccucgugaagaucccgugaggacuaguuauaagacugacuagcccgaugggccucccaacgggcccuccuccccuccuugcaccgagauuaauaaaaaaaaaaaaaaaaaaaaaaaaaaaaaaaaaaaaaaaaaaaaaaaaaaaaaaaaaaaaaaaaaaaaaaaaaaaaaaaaaaaaaaaaaaaaaaaaaaaa

SEQ ID NO: 43184 - RNA, 1548 nt, Artificial Sequence
  mRNA product Design i-3 (A100) comprising derived and/or modified sequence from LASV(Lassa virus/H.sapiens-wt/NGA/2016/ISTH_0009;Clade II)__AVO03571__GPCmut13 (opt1)
aggagaaagcuuaccaugggccagaucaucaccuucuuccaggaggugccccacgucaucgaggaggugaugaacaucgugcugaucgcccucagccugcuggccauccucaaggggaucuacaacgucgcgaccugcggccugcuggggcucguguccuuccugcugcucugcggccgcagcugcuccacgaccuacaaggggguguacgagcugcagacccuggagcucgacauggccagccugaacaugaccaugccgcuguccugcacgaagaacaacagccaccacuacaucauggucggcaacgagaccggccucgagcugacccugaccaacacguccaucaucaaccacaaguucugcaaccucagcgacgcccacaagaagaaccuguacgaccacgcccugauguccaucaucagcaccuuccaccucuccauccccaacuucaaccaguacgaggccaugagcugcgacuucaacgggggccggaucuccgugcaguacaaccugagccacuccuacgcgguggacgccgccaaccacugcgggaccaucgccaacggcguccugcagaccuucaugcgcauggcguggggcgggagcuacaucgcccucgacuccggcaaggggagcugggacugcaucaugacguccuaccaguaccugaucauccagaacaccaccugggaggaccacugccaguucagccggcccagccccaucggcuaccuggggcuccugucccagcgcacccgggacaucuacaucagccgccggcugcucggcacguucaccuggacccuguccgacagcgagggcaacgagacccccgggggcuacugccugacgcgcuggaugcucaucgaggccgagcugaagugcuucgggaacaccgccguggccaagugcaacgagaagcacgacgaggaguucugcgacaugcugcggcuguucgacuucaacaagcaggcgauccgccggcugaagaccgaggcccagauguccauccagcugaucaacaaggccgugaacgcccucaucaacgaccagcugaucaugaagaaccaccuccgcgacaucaugggcaucccguacugcaacuacagcaaguacugguaccucaaccacaccgucacggggaagaccucccugccccggugcuggcuggugagcaacggcuccuaccucaacgagacccacuucagcgacgacaucgagcagcaggccgacaacaugaucaccgagcugcugcagaaggaguacaucgaccgccagggcaagacgccccucgggcugguggaccuguucgucuucuccaccagcuucuaccugaucuccaucuuccuccaccuggugaagaucccgugaggacuaguuauaagacugacuagcccgaugggccucccaacgggcccuccuccccuccuugcaccgagauuaauaaaaaaaaaaaaaaaaaaaaaaaaaaaaaaaaaaaaaaaaaaaaaaaaaaaaaaaaaaaaaaaaaaaaaaaaaaaaaaaaaaaaaaaaaaaaaaaaaaaa

SEQ ID NO: 43185 - RNA, 1548 nt, Artificial Sequence
  mRNA product Design i-3 (A100) comprising derived and/or modified sequence from LASV(Lassa virus/H.sapiens-wt/NGA/2016/ISTH_0017;Clade II)__AVO03567__GPCmut13 (opt1)
aggagaaagcuuaccaugggccagaucaucaccuucuuccaggaggugccccacgucaucgaggaggugaugaacaucgugcugaucgcccucagccugcuggccauccucaaggggaucuacaacgucgcgaccugcggccuguucgggcugguguccuuccuccugcugugcggccgcagcugcuccacgaccuacaaggggguguacgagcuccagacccuggagcuggacauggccagccucaacaugaccaugccgcuguccugcacgaagaacaacagccaccacuacaucauggucggcaacgagaccggccuggagcucacccugaccaacacguccaucaucaaccacaaguucugcaaccugagcgacgcccacaagaagaaccucuacgaccacgcccugauguccaucaucagcaccuuccaccuguccauccccaacuucaaccaguacgaggccaugagcugcgacuucaacgggggcaagaucuccgugcaguacaaccucagccacaccuacgcgaucgacgccgccaaccacugcgggaccaucgccaacggcgugcugcagacguucaugcggauggcguggggcggguccuacaucgcccuggacagcggcaagggguccugggacugcaucaugaccagcuaccaguaccucaucauccagaacaccaccugggaggaccacugccaguucucccgccccagccccaucggcuaccuggggcugcucagccagcggacgcgcgacaucuacaucucccggcgccugcugggcaccuucaccuggacccucagcgacuccgagggcaacgagacgcccgggggcuacugccugacccgguggaugcugaucgaggccgagcucaagugcuucgggaacaccgccgucgccaagugcaacgagaagcacgacgaggaguucugcgacaugcugcgccuguucgacuucaacaagcaggcgauccggcgccucaagaccgaggcccagaugagcauccagcugaucaacaaggccgugaacgcccugaucaacgaccagcucaucaugaagaaccaccuccgggacaucaugggcauccccuacugcaacuacuccaaguacugguaccugaaccacacggugaccgggaagaccagccugccccgcugcuggcuggucuccaacggcagcuaccugaacgagacccacuucuccgacgacaucgagcagcaggccgacaacaugaucacggagcuccugcagaaggaguacauggaccggcagggcaagaccccgcuggggcucguggaccuguucguguucagcaccuccuucuaccugaucagcaucuuccugcaccucguccgcaucccgugaggacuaguuauaagacugacuagcccgaugggccucccaacgggcccuccuccccuccuugcaccgagauuaauaaaaaaaaaaaaaaaaaaaaaaaaaaaaaaaaaaaaaaaaaaaaaaaaaaaaaaaaaaaaaaaaaaaaaaaaaaaaaaaaaaaaaaaaaaaaaaaaaaaa

SEQ ID NO: 43186 - RNA, 1548 nt, Artificial Sequence
  mRNA product Design i-3 (A100) comprising derived and/or modified sequence from LASV(Lassa virus/H.sapiens-wt/NGA/2018/ISTH_0959;Clade II)__AVV65099__GPCmut13 (opt1)
aggagaaagcuuaccaugggccagaucaucaccuucuuccaggaggugccccacgucaucgaggaggugaugaacaucgugcugaucgcccucagccugcuggccauccucaaggggaucuacaacgucgugaccugcggccuguucgggcugguguccuuccuccugcugugcggccgcagcugcuccacgaccuacaagggggucuacgagcuccagacccuggagcuggacauggcgagccucaacaugaccaugccgcuguccugcacgaagaacaacagccaccacuacaucauggugggcaacgagaccggccuggagcucacccugaccaacacguccaucaucaaccacaaguucugcaaccugagcgacgcccacaagaagaaccucuacgaccacgcccugauguccaucaucagcaccuuccaccuguccauccccaacuucaaccaguacgaggccaugagcugcgacuucaacgggggcaagaucuccgugcaguacaaccucagccacgccuacgcgaucgacgccgccaaccacugcgggaccaucgccaacggcguccugcagaccuucaugcggauggcguggggcggguccuacaucgcccuggacagcggcaagggguccugggacugcaucaugacgagcuaccaguaccucaucauccagaacaccaccugggaggaccacugccaguucucccgccccagccccaucggcuaccuggggcugcucagccagcggacccgcgacaucuacaucucccggcgccugcugggcacguucaccuggacccucagcgacuccgagggcaacgagacccccgggggcuacugccugacgcgguggaugcugaucgaggccgagcucaagugcuucgggaacaccgccguggccaagugcaacgagaagcacgacgaggaguucugcgacaugcugcgccuguucgacuucaacaagcaggcgauccggcgccucaagaccgaggcccagaugagcauccagcugaucaacaaggccgugaacgcccugaucaacgaccagcucaucaugaagaaccaccuccgggacaucaugggcaucccguacugcaacuacuccaaguacugguaccugaaccacaccgucacggggaagaccagccugccccgcugcuggcugguguccaacggcagcuaccugaacgagacccacuucuccgacgacaucgagcagcaggccgacaacaugaucaccgagcuccugcagaaggaguacaucgaccggcagggcaagacgccccuggggcucguggaccuguucgucuucagcaccuccuucuaccugaucagcaucuuccugcaccucgugaagaucccgugaggacuaguuauaagacugacuagcccgaugggccucccaacgggcccuccuccccuccuugcaccgagauuaauaaaaaaaaaaaaaaaaaaaaaaaaaaaaaaaaaaaaaaaaaaaaaaaaaaaaaaaaaaaaaaaaaaaaaaaaaaaaaaaaaaaaaaaaaaaaaaaaaaaa

SEQ ID NO: 43187 - RNA, 1548 nt, Artificial Sequence
  mRNA product Design i-3 (A100) comprising derived and/or modified sequence from LASV(LASV003-NIG-2008;Clade II)__AIT17580__GPCmut13 (opt1)
aggagaaagcuuaccaugggccagaucaucaccuucuuccaggaggugccccacgucaucgaggaggugaugaacaucgugcugaucgcccucagccugcuggccauccucaaggggaucuacaacgucgcgaccugcggccuguucgggcugguguccuuccuccugcugugcggccgcagcugcuccacgaccuacaaggggguguacgagcuccagacccuggagcuggacauggccagccucaacaugaccaugccgcuguccugcacgaagaacaacagccaccacuacaucauggucggcaacgagaccggccuggagcucacccugaccaacacguccaucaucaaccacaaguucugcaaccugagcgacgcccacaagaagaaccucuacgaccacgcccugauguccaucaucagcaccuuccaccuguccauccccaacuucaaccaguacgaggccaugagcugcgacuucaacgggggcaagaucuccgugcaguacaaccucagccacaccuacgcgguggacgccgccaaccacugcgggaccaucgccaacggcguccugcagacguucaugcggauggcguggggcggguccuacaucgcccuggacagcggcaagggguccugggacugcaucaugaccagcuaccaguaccucaucauccagaacaccaccugggaggaccacugccaguucucccgccccagccccaucggcuaccuggggcugcucagccagcggacgcgcgacaucuacaucucccggcgccugcugggcaccuucaccuggacccucagcgacuccgagagcaacgagacgccgggcggguacugccugacccgguggaugcugaucgaggccgagcucaagugcuucggcaacaccgccguggccaagugcaacgagaagcacgacgaggaguucugcgacaugcugcgccuguucgacuucaacaagcaggcgauccggcgccucaaggccgaggcccagauguccauccagcugaucaacaaggccgugaacgcccugaucaacgaccagcucaucaugaagaaccaccuccgggacaucauggggauccccuacugcaacuacagcaaguacugguaccugaaccacaccgucacgggccgcaccucccugccccggugcuggcuggugagcaacggguccuaccugaacgagacccacuucagcgacgacaucgagcagcaggcggacaacaugaucaccgagcuccugcagaaggaguacauggaccgccagggcaagacgccccugggccucguggaccuguucgucuucuccaccagcuucuaccugaucuccaucuuccugcaccucgugaagaucccgugaggacuaguuauaagacugacuagcccgaugggccucccaacgggcccuccuccccuccuugcaccgagauuaauaaaaaaaaaaaaaaaaaaaaaaaaaaaaaaaaaaaaaaaaaaaaaaaaaaaaaaaaaaaaaaaaaaaaaaaaaaaaaaaaaaaaaaaaaaaaaaaaaaaa

SEQ ID NO: 43188 - RNA, 1548 nt, Artificial Sequence
  mRNA product Design i-3 (A100) comprising derived and/or modified sequence from LASV(LASV035-NIG-2009;Clade II)__AIT17588__GPCmut13 (opt1)
aggagaaagcuuaccaugggccagaucaucaccuucuuccaggaggugccccacgucaucgaggaggugaugaacaucgugcugaucgcccucagccugcuggccauccucaaggggaucuacaacgucgcgaccugcggccuguucgggcugguguccuuccuccugcugugcggccgcagcugcuccacgaccuacaaggggguguacgagcuccagacccuggagcuggacauggccagccucaacaugaccaugccgcuguccugcacgaagaacaacagccaccacuacaucauggucggcaacgagaccggccuggagcucacccugaccaacacguccaucaucaaccacaaguucugcaaccugagcgacgcccacaagaagaaccucuacgaccacgcccugauguccaucaucagcaccuuccaccuguccauccccaacuucaaccaguacgaggccaugagcugcgacuucaacgggggcaagaucuccgugcaguacaaccucagccacgcguacgccguggacgccgccaaccacugcgggaccaucgcgaacggcguccugcagaccuucaugcggauggccuggggcggguccuacaucgcccuggacagcggcaagggguccugggacugcaucaugacgagcuaccaguaccucaucauccagaacaccaccugggaggaccacugccaguucucccgccccagccccaucggcuaccuggggcugcucagccagcggacccgcgacaucuacaucucccggcgccugcugggcacguucaccuggacccucagcgacuccgagggcaacgagacccccgggggcuacugccugacgcgguggaugcugaucgaggccgagcucaagugcuucgggaacaccgccguggcgaagugcaacgagaagcacgacgaggaguucugcgacaugcugcgccuguucgacuucaacaagcaggccauccggcgccucaaggccgaggcccagaugagcauccagcugaucaacaaggccgugaacgcgcugaucaacgaccagcucaucaugaagaaccaccuccgggacaucaugggcauccccuacugcaacuacuccaaguacugguaccugaaccacaccgucaccgggaagacgagccugccccgcugcuggcugguguccaacggcagcuaccugaacgagacccacuucuccgacgacaucgagcagcaggccgacaacaugaucaccgagcuccugcagaaggaguacaucgaccggcagggcaagaccccgcuggggcucguggaccuguucgucuucagcacguccuucuaccugaucagcaucuuccugcaccucgugaagaucccgugaggacuaguuauaagacugacuagcccgaugggccucccaacgggcccuccuccccuccuugcaccgagauuaauaaaaaaaaaaaaaaaaaaaaaaaaaaaaaaaaaaaaaaaaaaaaaaaaaaaaaaaaaaaaaaaaaaaaaaaaaaaaaaaaaaaaaaaaaaaaaaaaaaaa

SEQ ID NO: 43189 - RNA, 1548 nt, Artificial Sequence
  mRNA product Design i-3 (A100) comprising derived and/or modified sequence from LASV(LASV1000-NIG-2009;Clade II)__AIT17782__GPCmut13 (opt1)
aggagaaagcuuaccaugggccagaucaucaccuucuuccaggaggugccccacgucaucgaggaggugaugaacaucgugcugaucgcccucagccugcuggccauccucaaggggaucuacaacgucgcgaccugcggccuguucgggcugguguccuuccuccugcugugcggccgcagcugcuccacgaccuacaaggggguguacgagcuccagacccuggagcuggacauggccagccucaacaugaccaugccgcuguccugcacgaagaacaacagccaccacuacaucauggucggcaacgagaccggccuggagcucacccugaccaacacguccaucaucaaccacaaguucugcaaccugagcgacgcccacaagaagaaccucuacgaccacgcccugauguccaucaucagcaccuuccaccuguccauccccaacuucaaccaguacgaggccaugagcugcgacuucaacgggggcaagaucuccgugcaguacaaccucagccacaccuacgcgguggacgccgccaaccacugcgggaccaucgccaacggcguccugcagacguucaugcggauggcguggggcggguccuacaucgcccuggacagcggcaagggguccugggacugcaucaugaccagcuaccaguaccucaucauccagaacaccaccugggaggaccacugccaguucucccgccccagccccaucggcuaccuggggcugcucagccagcggacgcgcgacaucuacaucucccggcgccugcugggcaccuucaccuggacccucagcgacuccgagggcaacgagacgcccgggggcuacugccugacccgguggaugcugaucgaggccgagcucaagugcuucgggaacaccgccguggccaagugcaacgagaagcacgacgaggaguucugcgacaugcugcgccuguucgacuucaacaagcaggcgaucaagcggcucaagaccgaggcccagaugagcauccagcugaucaacaaggccgugaacgcccugaucaacgaccagcucaucaugaagaaccaccuccgcgacaucaugggcauccccuacugcaacuacuccaaguacugguaccugaaccacacggucaccgggaagaccagccugccccggugcuggcugguguccaacggcagcuaccugaacgagacccacuucuccgacgacaucgagcagcaggccgacaacaugaucacggagcuccugcagaaggaguacaucgaccgccagggcaagaccccgcuggggcucguggaccuguucgucuucagcaccuccuucuaccugaucagcaucuuccugcaccucgugaagaucccgugaggacuaguuauaagacugacuagcccgaugggccucccaacgggcccuccuccccuccuugcaccgagauuaauaaaaaaaaaaaaaaaaaaaaaaaaaaaaaaaaaaaaaaaaaaaaaaaaaaaaaaaaaaaaaaaaaaaaaaaaaaaaaaaaaaaaaaaaaaaaaaaaaaaa

SEQ ID NO: 43190 - RNA, 1548 nt, Artificial Sequence
  mRNA product Design i-3 (A100) comprising derived and/or modified sequence from LASV(LASV221-NIG-2010;Clade II)__AIT17624__GPCmut13 (opt1)
aggagaaagcuuaccaugggccagaucaucaccuucuuccaggaggugccccacgucaucgaggaggugaugaacaucgugcugaucgcccucagccugcuggccauccucaaggggaucuacaacgucgcgaccugcggccuguucgggcugguguccuuccuccugcugugcggccgcagcugcuccacgaccuacaaggggguguacgagcuccagacccuggagcuggacauggccagccucaacaugaccaugccgcuguccugcacgaagaacaacagccaccacuacaucauggucggcaacgagaccggccuggagcucacccugaccaacacguccaucaucaaccacaaguucugcaaccugagcgacgcccacaagaagaaccucuacgaccacgcccugauguccaucaucagcaccuuccaccuguccauccccaacuucaaccaguacgaggccaugagcugcgacuucaacgggggcaagaucuccgugcaguacaaccucagccacaccuacgcgaucgacgccgccaaccacugcgggaccaucgccaacggcgugcugcagacguucaugcggauggcguggggcggguccuacaucgcccuggacagcggcaagggguccugggacugcaucaugaccagcuaccaguaccucaucauccagaacaccaccugggaggaccacugccaguucucccgccccagccccaucggcuaccuggggcugcucagccagcggacgcgcgacaucuacaucucccggcgccugcugggcaccuucaccuggacccucagcgacuccgagggcaacgagacgcccgggggcuacugccugacccgguggaugcugaucgaggccgagcucaagugcuucgggaacaccgccgucgccaagugcaacgagaagcacgacgaggaguucugcgacaugcugcgccuguucgacuucaacaagcaggcgauccggcgccucaagaccgaggcccagaugagcauccagcugaucaacaaggccgugaacgcccugaucaacgaccagcucaucaugaagaaccaccuccgggacaucaugggcauccccuacugcaacuacuccaaguacugguaccugaaccacacggugaccgggaagaccagccugccccgcugcuggcuggucuccaacggcagcuaccugaacgagacccacuucuccgacgacaucgagcagcaggccgacaacaugaucacggagaugcuccagaaggaguacauggaccggcagggcaagaccccgcuggggcugguggaccucuucguguucagcaccuccuucuaccugaucagcaucuuccugcaccuggucaagaucccgugaggacuaguuauaagacugacuagcccgaugggccucccaacgggcccuccuccccuccuugcaccgagauuaauaaaaaaaaaaaaaaaaaaaaaaaaaaaaaaaaaaaaaaaaaaaaaaaaaaaaaaaaaaaaaaaaaaaaaaaaaaaaaaaaaaaaaaaaaaaaaaaaaaaa

SEQ ID NO: 43191 - RNA, 1548 nt, Artificial Sequence
  mRNA product Design i-3 (A100) comprising derived and/or modified sequence from LASV(LASV237-NIG-2010;Clade II)__AIT17638__GPCmut13 (opt1)
aggagaaagcuuaccaugggccagaucaucaccuucuuccaggaggugccccacgucaucgaggaggugaugaacaucgugcugaucgcccucagccugcuggccauccucaaggggaucuacaacgucgcgaccugcggccuguucgggcugguguccuuccuccugcugugcggccgcagcugcuccacgaccuacaaggggguguacgagcuccagacccuggagcuggacauggccagccucaacaugaccaugccgcuguccugcacgaagaacaacagccaccacuacaucauggucggcaacgagaccggccuggagcucacccugaccaacacguccaucaucaaccacaaguucugcaaccugagcgacgcccacaagaaggaccucuacgaccacgcccugauguccaucaucagcaccuuccaccuguccauccccaacuucaaccaguacgaggccaugagcugcgacuucaacgggggcaagaucuccgugcaguacaaccucagccacaccuacgcgguggacgccgccaaccacugcgggaccaucgccaacggcguccugcagacguucaugcggauggcguggggcggguccuacaucgcccuggacagcggcaagggguccugggacugcaucaugaccagcuaccaguaccucaucauccagaacaccaccugggaggaccacugccaguucucccgccccagccccaucggcuaccuggggcugcucagccagcggacgcgcgacaucuacaucucccggcgccugcugggcaccuucaccuggacccucagcgacuccgagggcaacgagacgcccgggggcuacugccugacccgguggaugcugaucgaggccgagcucaagugcuucgggaacaccgccguggccaagugcaacgagaagcacgacgaggaguucugcgacaugcugcgccuguucgacuucaacaagcaggcgauccggcgccucaagaccgaggcccagaugagcauccagcugaucaacaaggccgugaacgcccugaucaacgaccagcucaucaugaagaaccaccuccgggacaucaugggcauccccuacugcaacuacuccaaguacugguaccugaaccacacggucaccgggaagaccagccugccccgcugcuggcugguguccaacggcagcuaccugaacgagacccacuucuccgacgacaucgagcagcaggccgacaacaugaucacggagcuccugcagaaggaguacauggaccggcagggcaagaccccgcuggggcucguggaccuguucgucuucagcaccuccuucuaccugaucagcaucuuccugcaccucaucaagaucccgugaggacuaguuauaagacugacuagcccgaugggccucccaacgggcccuccuccccuccuugcaccgagauuaauaaaaaaaaaaaaaaaaaaaaaaaaaaaaaaaaaaaaaaaaaaaaaaaaaaaaaaaaaaaaaaaaaaaaaaaaaaaaaaaaaaaaaaaaaaaaaaaaaaaa

SEQ ID NO: 43192 - RNA, 1548 nt, Artificial Sequence
  mRNA product Design i-3 (A100) comprising derived and/or modified sequence from LASV(LASV253-NIG-2011;Clade II)__AIT17670__GPCmut13 (opt1)
aggagaaagcuuaccaugggccagaucaucaccuucuuccaggaggugccccacgucaucgaggaggugaugaacaucgugcugaucgcccucagccugcuggccauccucaaggggaucuacaacgucgcgaccugcggccuguucgggcugguguccuuccuccugcugugcggccgcagcugcuccacgaccuacaaggggguguacgagcuccagacccuggagcuggacauggccagccucaacaugaccaugccgcuguccugcacgaagaacaacagccaccacuacaucauggucggcaacgagaccggccuggagcucacccugaccaacacguccaucaucaaccacaaguucugcaaccugagcgacgcccacaagaagaaccucuacgaccacgcccugauguccaucaucagcaccuuccaccuguccauccccaacuucaaccaguacgaggccaugagcugcgacuucaacgggggcaagaucuccgugcaguacaaccucagccacaccuacgcgguggacgccgccaaccacugcgggaccaucgccaacggcguccugcagacguucaugcggauggcguggggcggguccuacaucgcccuggacagcggcaagggguccugggacugcaucaugaccagcuaccaguaccucaucauccagaacaccaccugggaggaccacugccaguucucccgccccagccccaucggcuaccuggggcugcucagccagcggacgcgcgacaucuacaucucccggcgccugcugggcaccuucaccuggacccucagcgacuccgagggcaacgagacgcccgggggcuacugccugacccgguggaugcugaucgaggccgagcucaagugcuucgggaacaccgccguggccaagugcaacgagaagcacgacgaggaguucugcgacaugcugcgccuguucgacuucaacaagcaggcgauccggcgccucaaggccgaggcccagaugagcauccagcugaucaacaaggccgugaacgcccugaucaacgaccagcucaucaugaagaaccaccuccgggacaucaugggcaucccguacugcaacuacuccaaguacugguaccugaaccacaccgucacggggcgcaccagccugccccggugcuggcugguguccaacggcagcuaccugaacgagacccacuucuccgacgacaucgagcagcaggcggacaacaugaucaccgagcuccugcagaaggaguacaucgaccgccagggcaagacgccccuggggcucguggaccuguucgucuucagcaccuccuucuaccugaucagcaucuuccugcaccucgugaagaucccgugaggacuaguuauaagacugacuagcccgaugggccucccaacgggcccuccuccccuccuugcaccgagauuaauaaaaaaaaaaaaaaaaaaaaaaaaaaaaaaaaaaaaaaaaaaaaaaaaaaaaaaaaaaaaaaaaaaaaaaaaaaaaaaaaaaaaaaaaaaaaaaaaaaaa

SEQ ID NO: 43193 - RNA, 1548 nt, Artificial Sequence
  mRNA product Design i-3 (A100) comprising derived and/or modified sequence from LASV(LASV254-NIG-2011;Clade II)__AIT17674__GPCmut13 (opt1)
aggagaaagcuuaccaugggccagaucaucaccuucuuccaggaggugccccacgucaucgaggaggugaugaacaucgugcugaucgcccucagccugcuggccauccucaaggggaucuacaacgucgcgaccugcggccuguucgggcugguguccuuccuccugcugugcggccgcagcugcuccacgaccuacaaggggguguacgagcuccagacccuggagcuggacaugaccaaccucaacaugacgaugccgcugagcugcaccaagaacaacucccaccacuacaucauggucggcaacgagaccggccuggagcucacccugacgaacaccagcaucaucaaccacaaguucugcaaccuguccgacgcccacaagaagaaccucuacaaccacgcccugaugagcaucaucuccaccuuccaccugagcauccccaacuucaaccaguacgaggccauguccugcgacuucaacgggggcaagaucagcgugcaguacaaccucucccacagcuacgccguggacgcggccaaccacugcgggaccaucgccaacggcguccugcagacguucaugcggauggccuggggcggguccuacaucgcgcuggacagcggcaaggggaacugggacugcaucaugaccuccuaccaguaccucaucauccagaacaccaccugggaggaccacugccaguucagccgccccucccccaucggcuaccuggggcugcucagccagcggacgcgcgacaucuacaucagccggcgccugcugggcaccuucaccuggacccucuccgacagcgagggcaacgagacgcccgggggcuacugccugacccgguggaugcugaucgaggccgagcucaagugcuucgggaacaccgccguggccaagugcaacgagaagcacgacgaggaguucugcgacaugcugcgccuguucgacuucaacaagcaggccauccggcgccucaagaccgaggcgcaggccaacauccagcugaucaacaaggccgugaacgcccugaucaacgaccagcucaucaugaagaaccaccuccgggacaucaugggcauccccuacugcaacuacuccaaguacugguaccugaaccacacggucaccgggaagaccagccugccccgcugcuggcugguguccaacggcagcuaccugaacgagacccacuucuccgacgacaucgagcagcaggccgacaacaugaucacggagcuccugcagaaggaguacauggaccggcagggcaagaccccgcuggggcucguggaccuguucgucuucagcaccuccuucuaccugaucagcaucuuccugcaccucgugaagaucccgugaggacuaguuauaagacugacuagcccgaugggccucccaacgggcccuccuccccuccuugcaccgagauuaauaaaaaaaaaaaaaaaaaaaaaaaaaaaaaaaaaaaaaaaaaaaaaaaaaaaaaaaaaaaaaaaaaaaaaaaaaaaaaaaaaaaaaaaaaaaaaaaaaaaa

SEQ ID NO: 43194 - RNA, 1548 nt, Artificial Sequence
  mRNA product Design i-3 (A100) comprising derived and/or modified sequence from LASV(Nig08-A19;Clade III)__ADU56618__GPCmut13 (opt1)
aggagaaagcuuaccaugggccagaucgugaccuucuuccaggaggucccccacgugaucgaggaggugaugaacaucguccugaucgcccucagcauccuggccauccugaaggggcucuacaacaucgcgaccugcggccugaucgggcuggugacguuccuccugcuguccggccgcagcugcuccaugaccuacaaggggguguacgagcuccagacccuggagcugaacaugaacacccucaacaugacgaugccgcugagcugcaccaagaacaacucccaccacuacaucauggucggcaacgagaccggccuggagcucacccugacgaacaccagccugcuccaccacaaguucugcaaccuguccgacgcccacaagaagaaccuguacgaccacacccucaugagcaucaucuccaccuuccaccugagcauccccaacuucaaccaguacgaggccauguccugcgacuucaacgggggcaagaucacggugcaguacaaccugagccacuccuacgccaucgacgccgcgaaccacugcgggaccguggccaacggcguccuccagaccuucaugcggauggccuggggcgggagcuacaucgcccuggacuccggccgcgggaagugggacugcaucaugaccagcuaccaguaccugaucauccagaacacgaccugggaggaccacugccaguucucccggcccagccccaucggcuaccucgggcugcugucccagcgcacccgggacaucuacaucagccgccggcuccugggcaccuucacguggacccugagcgacuccgagggcaacgagacccccgggggcuacugccucacccgcuggaugcugaucgaggcggagcugaagugcuucgggaacacggccguggccaagugcaacgagaagcacgacgaggaguucugcgacaugcuccggcuguucgacuucaacaagcaggccauccgccggcugaaggccgaggcgcagaugagcauccagcucaucaacaaggccgugaacgcccugaucaacgaccagcugaucaugaagaaccaccuccgcgacaucaugggcauccccuacugcaacuacuccaaguacugguaccugaaccacaccagcaccgggcggaccucccugccccgcugcuggcucgucagcaacggcuccuaccugaacgagacgcacuucagcgacgacaucgagcagcaggccgacaacaugaucaccgagaugcugcagaaggaguaccucgaccggcagggcaagaccccgcuggggcugguggaccuguucguguucuccaccagcuucuaccucaucuccaucuuccugcaccuggucaagaucccgugaggacuaguuauaagacugacuagcccgaugggccucccaacgggcccuccuccccuccuugcaccgagauuaauaaaaaaaaaaaaaaaaaaaaaaaaaaaaaaaaaaaaaaaaaaaaaaaaaaaaaaaaaaaaaaaaaaaaaaaaaaaaaaaaaaaaaaaaaaaaaaaaaaaa

SEQ ID NO: 43195 - RNA, 1551 nt, Artificial Sequence
  mRNA product Design i-3 (A100) comprising derived and/or modified sequence from LASV(G1180-SLE-2010;Clade IV)__AIT17168__GPCmut13 (opt1)
aggagaaagcuuaccaugggccagaucgugaccuucuuccaggaggucccccacgugaucgaggaggugaugaacaucguccugaucgcccucagcauccuggccgugcugaaggggcucuacaacuucgcgaccugcggccugguggggcugcucaccuuccugcugcucugcggccgcuccugcaccgccagccgguacaagggggucuacgagcugcagacccuggagcucaacauggagacccugaacaugacgaugccgcuguccugcaccaagaacaacagccaccacuacaucauggugggcaacgagaccggccucgagcugacccugacgaacaccuccaucaucaaccacaaguucugcaaccucagcgacgcccacaagaagaaccuguacgaccacgcccugauguccaucaucagcaccuuccaccucuccauccccaacuucaaccaguacgaggccaugagcugcgacuucaacgggggcaagaucuccgugcaguacaaccugagccacuccuacgcgggggacgccgccaaccacugcggcaccgucgccaacggggugcugcagacguucaugcgcauggcguggggcggcagcuacaucgcccucgacuccgggcacggcagcugggacugcaucaugaccuccuaccaguaccugaucauccagaacaccaccugggaggaccacugccaguucagccggcccucccccaucggguaccugggccuccugagccagcgcacgcgggacaucuacaucagccgccggcugcucggcaccuucaccuggacccuguccgacagcgaggggaaggacacgccgggcggguacugccugacccgcuggaugcucaucgaggccgagcugaagugcuucggcaacaccgccguggccaagugcaacgagaagcacgacgaggaguucugcgacaugcugcggcuguucgacuucaacaagcaggcgauccagcgccugaaggccgaggcccagauguccauccagcugaucaacaaggccgucaacgcccucaucaacgaccagcugaucaugaagaaccaccuccgggacaucauggggauccccuacugcaacuacagcaaguacugguaccucaaccacaccacgaccggcaagaccucccugcccaagugcuggcuggugagcaacggcuccuaccucaacgagacccacuucagcgacgacaucgagcagcaggcggacaacaugaucacggagaugcugcagaaggaguacauggagcgccaggggaagacgccccugggccucguggaccuguucgucuucuccaccagcuucuaccugaucuccaucuuccugcaccucgugaagaucccgugaggacuaguuauaagacugacuagcccgaugggccucccaacgggcccuccuccccuccuugcaccgagauuaauaaaaaaaaaaaaaaaaaaaaaaaaaaaaaaaaaaaaaaaaaaaaaaaaaaaaaaaaaaaaaaaaaaaaaaaaaaaaaaaaaaaaaaaaaaaaaaaaaaaa

SEQ ID NO: 43196 - RNA, 1551 nt, Artificial Sequence
  mRNA product Design i-3 (A100) comprising derived and/or modified sequence from LASV(G1442-SLE-2011;Clade IV)__AIT17180__GPCmut13 (opt1)
aggagaaagcuuaccaugggccagaucgugaccuucuuccaggaggucccccacgugaucgaggaggugaugaacaucguccugaucgcccucagcauccuggccgugcugaaggggcucuacaacguggcgaccugcggccugaucgggcuggucacguuccuccugcugugcggccgcuccugcaccaccacccucuacaaggggguguacgagcugcagacgcuggagcucaacauggagacccugaacaugaccaugccgcugagcugcaccaagaacaacucccaccacuacauccgggugggcaacgagacgggccucgagcugacccugaccaacaccagcaucaucaaccacaaguucugcaaccucuccgacgcccacaagaagaaccuguacgaccacgcccugaugagcaucaucuccacguuccaccucagcauccccaacuucaaccaguacgaggccauguccugcgacuucaacgggggcaagaucagcguccaguacaaccugucccacagcuacgccggggacgcggccaaccacugcggcaccguggccaacggggugcugcagaccuucaugcgcauggccuggggcggcuccuacaucgcgcucgacagcgggcggggcaacugggacugcaucaugaccuccuaccaguaccugaucauccagaacacgaccugggacgaccacugccaguucagccgccccucccccaucggguaccugggccuccugagccagcggacccgcgacgucuacaucucccggcgccugcucggcaccuucacguggacccugagcgacagcgaggggaaggacaccccgggcggguacugccugacccgguggaugcucaucgaggccgagcugaagugcuucggcaacacggccguggccaagugcaacgagaagcacgacgaggaguucugcgacaugcugcgccucuucgacuucaacaagcaggccauccagcggcugaaggcggaggcccagauguccauccagcugaucaacaaggccgugaacgcccucaucaacgaccagcugaucaugaagaaccaccuccgcgacaucauggggauccccuacugcaacuacagcaaguacugguaccugaacaacaccgccaccggcaagaccucccugcccaagugcuggcugaucagcaacggcuccuaccucaacgagacgcacuucagcgacgacaucgagcaggaggcggacaacaugaucaccgagaugcugcagaaggaguacauggagcggcaggggaagacgccccugggccucgucgaccuguucguguucuccaccagcuucuaccugaucuccaucuuccugcaccucgugaagaucccgugaggacuaguuauaagacugacuagcccgaugggccucccaacgggcccuccuccccuccuugcaccgagauuaauaaaaaaaaaaaaaaaaaaaaaaaaaaaaaaaaaaaaaaaaaaaaaaaaaaaaaaaaaaaaaaaaaaaaaaaaaaaaaaaaaaaaaaaaaaaaaaaaaaaa

SEQ ID NO: 43197 - RNA, 1551 nt, Artificial Sequence
  mRNA product Design i-3 (A100) comprising derived and/or modified sequence from LASV(G3010-SLE-2013;Clade IV)__AIT17344__GPCmut13 (opt1)
aggagaaagcuuaccaugggccagaucgugaccuucuuccaggaggucccccacgugaucgaggaggugaugaacaucguccugaucgcccucagcauccuggccgugcugaaggggcucuacaacuucgcgaccugcggccugguggggcuggucacguuccuccugcugugcggccgcuccugcaccaccagccucuacaaggggguguacgagcugcagacccuggagcucaacauggagacgcugaacaugaccaugccgcuguccugcaccaagaacaacagccaccacuacaucauggugggcaacgagaccggccucgagcugacgcugaccaacaccuccaucaucaaccacaaguucugcaaccucagcgacgcccacaagaagaaccuguacaaccacgcccugauguccaucaucagcaccuuccaccucuccauccccaacuucaaccaguacgaggccaugagcugcgacuucaacgggggcaagaucuccguccaguacaaccugagccacuccuacgccggggacgcggccagccacugcggcacgguggccaacggggugcugcagaccuucaugcggauggccuggggcggcuccuacaucgcgcucgacagcggguacggcaagugggacugcaucaugaccuccuaccaguaccugaucauccagaacaccacgugggaggaccacugccaguucagccgccccucccccaucggguaccugggccuccugagccagcggacccgcgacaucuacaucagccggcgccugcucggcaccuucaccuggacgcuguccgacagcgaggggaaggacaccccgggcggguacugccugacccgguggaugcucaucgaggccgagcugaagugcuucggcaacaccgccgucgccaagugcaacgagaagcacgacgaggaguucugcgacaugcugcgccucuucgacuucaacaagcaggccauccagcggcugaagacggaggcgcagauguccauccagcugaucaacaaggccgugaacgcccucaucaacgaccagcugaucaugaagaaccaccuccgcgacaucauggggauccccuacugcaacuacagcaaguacugguaccugaaccacaccaccaccggcaagacgucccugcccaagugcuggcuggugagcaacggcuccuaccucaacgagacccacuucagcgacgacaucgagcagcaggccgacaacaugaucaccgagaugcugcagaaggaguacauggagcggcaggggaagacgccccugggccucgucgaccuguucguguucuccaccagcuucuaccugaucuccaucuuccugcaccucgugaagaucccgugaggacuaguuauaagacugacuagcccgaugggccucccaacgggcccuccuccccuccuugcaccgagauuaauaaaaaaaaaaaaaaaaaaaaaaaaaaaaaaaaaaaaaaaaaaaaaaaaaaaaaaaaaaaaaaaaaaaaaaaaaaaaaaaaaaaaaaaaaaaaaaaaaaaa

SEQ ID NO: 43198 - RNA, 1551 nt, Artificial Sequence
  mRNA product Design i-3 (A100) comprising derived and/or modified sequence from LASV(G502-SLE-2009;Clade IV)__AIT17126__GPCmut13 (opt1)
aggagaaagcuuaccaugggccagaucgugaccuucuuccaggaggucccccacgugaucgaggaggugaugaacaucguccugaucgcccucagcauccuggccgugcugaaggggcucuacaacuucgcgaccugcggccugguggggcugcucacguuccugcugcucugcggccgcuccugcaccaccgggcuguacaagggcgucuacgagcugcagacccucgagcugaacauggagacgcugaacaugaccaugccgcucagcugcaccaagaacaacucccaccacuacaucauggugggcaacgagaccgggcuggagcugacgcucaccaacaccagcaucaucaaccacaaguucugcaaccuguccgacgcccacaagaagaaccuguacgaccacgcccucaugagcaucaucuccaccuuccaccugagcauccccaacuucaaccaguacgaggccauguccugcgacuucaacggcgggaagaucagcgugcaguacaaccugucccacagcuacgccggcgacgcggccgaccacugcgggacggucgccaacggcgugcuccagaccuucaugcggauggccuggggcggguccuacaucgcgcuggacagcggccgcgggcggugggacugcaucaugaccuccuaccaguaccugaucauccagaacaccacgugggaggaccacugccaguucagccgccccucccccaucggcuaccucggccugcugagccagcggacccgcgacaucuacaucucccggcgccuccuggggaccuucaccuggacgcugagcgacagcgagggcaaggacacccccgggggcuacugccucacccgguggaugcugaucgaggccgagcugaagugcuucgggaacaccgccguggccaagugcaacgagaagcacgacgaggaguucugcgacaugcuccgccuguucgacuucaacaagcaggccauccagcggcugaaggcggaggcccagauguccauccagcucaucaacaaggccgucaacgcccugaucaacgaccagcuggugaugaagaaccaccuccgcgacaucaugggcauccccuacugcaacuacagccgguacugguaccugaaccacacgaccaccggccgcaccucccugcccaagugcuggcucgugagcaacggguccuaccugaacgagacgcacuucagcgacgacaucgagcagcaggccgacaacaugaucaccgagaugcugcagaaggaguacauggagcggcagggcaagaccccgcucgggcuggucgaccuguucguguucuccaccagcuucuaccugaucuccaucuuccuccaccuggugaagaucccgugaggacuaguuauaagacugacuagcccgaugggccucccaacgggcccuccuccccuccuugcaccgagauuaauaaaaaaaaaaaaaaaaaaaaaaaaaaaaaaaaaaaaaaaaaaaaaaaaaaaaaaaaaaaaaaaaaaaaaaaaaaaaaaaaaaaaaaaaaaaaaaaaaaaa

SEQ ID NO: 43199 - RNA, 1551 nt, Artificial Sequence
  mRNA product Design i-3 (A100) comprising derived and/or modified sequence from LASV(G733-SLE-2010;Clade IV)__AIT17154__GPCmut13 (opt1)
aggagaaagcuuaccaugggccagaucgugaccuucuuccaggaggucccccacgugaucgaggaggugaugaacaucguccugaucgcccucagcauccuggccgugcugaaggggcucuacaacuucgcgaccugcggcaucguggggcuggucuccuuccugcuccugugcggccgcagcugcacgaccucccuguacaaggggguguacgagcuccagacccuggagcugaacauggagacccucaacaugacgaugccgcugagcugcaccaagaacaacucccaccacuacaucauggugggcaacgagaccggccuggagcucacccugacgaacaccagcaucaucaaccacaaguucugcaaccuguccgacgcccacaagaagaaccucuacgaccacgcccugaugagcaucaucuccaccuuccaccugagcauccccaacuucaaccaguacgaggccauguccugcgacuucaacgggggcaagaucagcguccaguacaaccucucccacagcuacgccggggacgcggccaaccacugcggcaccaucgccaacggggugcugcagacguucaugcggauggccuggggcggcuccuacaucgcgcuggacagcgggcgcgaccggugggacugcaucaugaccuccuaccaguaccucaucauccagaacaccaccugggaggaccacugccaguucagccgccccucccccaucggcuaccuggggcugcucagccagcggacgcgcgacaucuacaucagccggcgccugcugggcaccuucaccuggacccucuccgacagcgagggcaaggacacgcccgggggcuacugccugacccgguggaugcugaucgaggccgagcucaagugcuucgggaacaccgccguggccaagugcaacgagaagcacgacgaggaguucugcgacaugcugcgccuguucgacuucaacaagcaggccauccagcggcucaaggcggaggcccagauguccauccagcugaucaacaaggccgucaacgcccugaucaacgaccagcucaucaugaagaaccaccuccgcgacaucaugggcauccccuacugcaacuacagcaaguacugguaccugaaccacaccacgaccgggaagaccucccugcccaagugcuggcuggugagcaacggcuccuaccugaacgagacccacuucagcgacgacaucgagcagcaggccgacaacaugaucacggagaugcuccagaaggaguacauggagcggcagggcaagaccccgcuggggcugguggaccucuucgucuucuccaccagcuucuaccugaucuccaucuuccugcaccuggugaagaucccgugaggacuaguuauaagacugacuagcccgaugggccucccaacgggcccuccuccccuccuugcaccgagauuaauaaaaaaaaaaaaaaaaaaaaaaaaaaaaaaaaaaaaaaaaaaaaaaaaaaaaaaaaaaaaaaaaaaaaaaaaaaaaaaaaaaaaaaaaaaaaaaaaaaaa

SEQ ID NO: 43200 - RNA, 1551 nt, Artificial Sequence
  mRNA product Design i-3 (A100) comprising derived and/or modified sequence from MOPV/LASV reassortant(IGS-1;Clade IV)__AFY05576__GPCmut13 (opt1)
aggagaaagcuuaccaugggccagaucgugaccuucuuccaggaggucccccacgugaucgaggaggugaugaacaucguccugaucgcccucagcgugcuggccgugcugaaggggcucuacaacuucgcgaccugcggccuggucgggcuggugacguuccuccugcugugcggccgcuccugcaccaccagccucuacaaggggguguacgagcugcagacccuggagcucaacauggagacgcugaacaugaccaugccgcuguccugcaccaagaacaacagccaccacuacaucauggucggcaacgagaccggccucgagcugacgcugaccaacaccuccaucaucaaccacaaguucugcaaccucagcgacgcccacaagaagaaccuguacgaccacgcccugauguccaucaucagcaccuuccaccucuccauccccaacuucaaccaguacgaggccaugagcugcgacuucaacgggggcaagaucuccgugcaguacaaccugagccacuccuacgccggggacgcggccaaccacugcggcacgguggccaacgggguccugcagaccuucaugcggauggccuggggcggcagcuacaucgcgcucgacuccgggcgcggcaacugggacugcaucaugaccagcuaccaguaccugaucauccagaacaccacgugggaggaccacugccaguucucccggcccagccccaucggguaccugggccuccugucccagcgcacccgggacaucuacaucagccgccggcugcucggcaccuucaccuggacgcugagcgacuccgagggggaggacaccccgggcggguacugccugacccgcuggaugcucaucgaggccgagcugaagugcuucggcaacaccgccguggccaagugcaacgagaagcacgacgaggaguucugcgacaugcugcggcuguucgacuucaacaagcaggccauccagcgccugaaggcggaggcccagaugagcauccagcugaucaacaaggccgugaacgcccucaucaacgaccagcugaucaugaagaaccaccuccgggacaucauggggauccccuacugcaacuacuccaaguacugguaccucaaccacacgaccaccggccgcaccagccugcccaagugcuggcuggucuccaacggcagcuaccucaacgagacgcacuucuccgacgacaucgagcagcaggccgacaacaugaucaccgagaugcugcagaaggaguacauggagcggcaggggaagacgccccugggccucguggaccuguucguguucagcaccuccuucuaccugaucagcaucuuccugcaccucgucaagaucccgugaggacuaguuauaagacugacuagcccgaugggccucccaacgggcccuccuccccuccuugcaccgagauuaauaaaaaaaaaaaaaaaaaaaaaaaaaaaaaaaaaaaaaaaaaaaaaaaaaaaaaaaaaaaaaaaaaaaaaaaaaaaaaaaaaaaaaaaaaaaaaaaaaaaa

SEQ ID NO: 43201 - RNA, 1551 nt, Artificial Sequence
  mRNA product Design i-3 (A100) comprising derived and/or modified sequence from LASV(LM765-SLE-2012;Clade IV)__AIT17814__GPCmut13 (opt1)
aggagaaagcuuaccaugggccagaucgugaccuucuuccaggaggucccccacgugaucgaggaggugaugaacaucguccugaucgcccucagcauccuggccgugcugaaggggcucuacaacuucgcgaccugcggccugguggggcuggucacguuccuccugcugugcggccgcuccugcaccaccagccucuacaaggggguguacgagcugcagacccuggagcucaacauggagacgcugaacaugaccaugccgcuguccugcaccaagaacaacagccaccacuacaucauggugggcaacgagaccggccucgagcugacgcugaccaacaccuccaucaucgaccacaaguucugcaaccucagcgacgcccaccggaagaaccuguacgaccacgcccugauguccaucaucagcaccuuccaccucuccauccccaacuucaaccaguacgaggccaugagcugcgacuucaacgggggcaagaucuccguccaguacaaccugagccacuccuacgccaaggacgcggccgaccacugcgggacgguggccaacggcgugcugcagaccuucaugcgcauggccuggggcgggagcuacaucgcgcucgacuccggccgggggcgcugggacugcaucaugaccagcuaccaguaccugaucauccagaacaccacgugggaggaccacugccaguucucccggcccagccccaucggcuaccuggggcuccugucccagcgcacccgggacaucuacaucagccgccggcugcucggcaccuucaccuggacgcugagcgacuccgagggcaaggacacccccgggggcuacugccugacccgcuggaugcucaucgaggccgagcugaagugcuucgggaacaccgccgucgccaagugcaacgagaagcacgacgaggaguucugcgacaugcugcggcuguucgacuucaacaagcaggccauccagcgccugaaggcggaggcccagaugagcauccagcugaucaacaaggccgugaacgcccucaucaacgaccagcugaucaugaagaaccaccuccgggacaucaugggcauccccuacugcaacuacuccaaguacugguaccucaaccacacgaccaccgggaagaccagccugcccaagugcuggcugguguccaacggcagcuaccucaacgagacgcacuucuccgacgacaucgagcagcaggccgacaacaugaucaccgagaugcugcagaaggaguacauggagcgccagggcaagaccccgcuggggcucgucgaccuguucguguucagcaccuccuucuaccugaucagcaucuuccugcaccucgugaagaucccgugaggacuaguuauaagacugacuagcccgaugggccucccaacgggcccuccuccccuccuugcaccgagauuaauaaaaaaaaaaaaaaaaaaaaaaaaaaaaaaaaaaaaaaaaaaaaaaaaaaaaaaaaaaaaaaaaaaaaaaaaaaaaaaaaaaaaaaaaaaaaaaaaaaaa

SEQ ID NO: 43202 - RNA, 1551 nt, Artificial Sequence
  mRNA product Design i-3 (A100) comprising derived and/or modified sequence from LASV(LM776-SLE-2012;Clade IV)__AIT17824__GPCmut13 (opt1)
aggagaaagcuuaccaugggccagaucgugaccuucuuccaggaggucccccacgugaucgaggaggugaugaacaucguccugaucgcccucagcauccuggccgugcugaaggggcucuacaacuucgcgaccugcggccugguggggcuggucacguuccuccugcugugcggccgcuccugcaccaccagcguguacaaggggguguacgagcuccagacccuggagcugaacauggagacgcucaacaugaccaugccgcuguccugcaccaagaacaacagccaccacuacaucauggucggcaacgagaccggccuggagcucacgcugaccaacaccuccaucaucaaccacaaguucugcaaccugagcgacgcccacaagaagaaccucuacgaccacgcccugauguccaucaucagcaccuuccaccuguccauccccaacuucaaccaguacgaggccaugagcugcgacuucaacgggggcaagaucuccgugcaguacaaccucagccacuccuacgccggggacgcggccaaccacugcggcacgguggccaacgggguccugcagaccuucaugcggauggccuggggcggcagcuacaucgcgcuggacuccgggcacggcaagugggacugcaucaugaccagcuaccaguaccucaucauccagaacaccacgugggaggaccacugccaguucucccgccccagccccaucggguaccugggccugcucucccagcggacccgcgacaucuacaucagccggcgccugcugggcaccuucaccuggacgcucagcgacuccgaggggaaggacaccccgggcggguacugccugacccgguggaugcugaucgaggccgagcucaagugcuucggcaacaccgccguggccaagugcaacgagaagcacgacgaggaguucugcgacaugcugcgccuguucgacuucaacaagcaggccauccagcggcucaaggcggaggcccagaugagcauccagcugaucaacaaggccgugaacgcccugaucaacgaccagcucaucaugaagaaccaccuccgcgacaucauggggauccccuacugcaacuacuccaaguacugguaccugaaccacacgaccaccggcaagaccagccugcccaagugcuggcuggucuccaacggcagcuaccugaacgagacgcacuucuccgacgacaucgagcagcaggccgacaacaugaucaccgagaugcuccagaaggaguacauggagcggcaggggaagacgccccugggccugguggaccucuucguguucagcaccuccuucuaccugaucagcaucuuccugcaccuggucaagaucccgugaggacuaguuauaagacugacuagcccgaugggccucccaacgggcccuccuccccuccuugcaccgagauuaauaaaaaaaaaaaaaaaaaaaaaaaaaaaaaaaaaaaaaaaaaaaaaaaaaaaaaaaaaaaaaaaaaaaaaaaaaaaaaaaaaaaaaaaaaaaaaaaaaaaa

SEQ ID NO: 43203 - RNA, 1551 nt, Artificial Sequence
  mRNA product Design i-3 (A100) comprising derived and/or modified sequence from LASV(Mad39;Clade IV)__ANH09722__GPCmut13 (opt1)
aggagaaagcuuaccaugggccagaucgugaccuucuuccaggaggucccccacgugaucgaggaggugaugaacaucguccugaucgcccucagcauccuggccgugcugaaggggcucuacaacguggcgaccugcggccugaucgggcuggucacguuccuccugcugugcggccgcuccugcaccaccacccucuacaaggggguguacgagcugcaggcccuggagcucaacauggagacgcugaacaugaccaugccgcugagcugcaccaagaacaacucccaccacuacauccgggugggcaacgagaccggccucgagcugacgcugaccaacaccagccucaucaaccacaaguucugcaaccuguccgacgcccacaagaagaaccuguacgaccacgcccucaugagcaucaucuccaccuuccaccugagcauccccaacuucaaccaguacgaggccauguccugcgacuucaacgacgggaagaucagcguccaguacaaccugucccacacguacgcgggcgacaccgccaaccacugcgggaccguggccaacggcgugcuccagaccuucaugcgcauggccuggggcgggagcuacaucgcgcuggacuccggccgcgggggcugggacugcaucaugacgagcuaccaguaccugaucauccagaacaccaccugggaggaccacugccaguucucccggcccagccccaucggguaccucggccugcugucccagcggacccgcgacaucuacaucagccggcgccuccugggcacguucaccuggacccuguccgacagcgaggggaaggacaccccgggcggguacugccucacgcgguggaugcugaucgaggccgagcugaagugcuucggcaacaccgccgucgccaagugcaacgagaagcacgacgaggaguucugcgacaugcuccgccuguucgacuucaacaagcaggccauccagcggcugaaggcggaggcccagaugagcauccagcucaucaacaaggccgugaacgcccugaucaacgaccagcugaucaugaagaaccaccuccgcgacaucauggggauccccuacugcaacuacuccaaguacugguaccugaaccacaccgugaccggcaagacgagccugcccaagugcuggcucgucuccaacggcagcuaccugaacgagacccacuucuccgacgacaucgagcagcaggccgacaacaugaucaccgagaugcugcagaaggaguacauggagcggcaggggaagacgccccucggccugguggaccuguucguguucagcaccuccuucuaccugaucagcaucuuccuccaccuggucaagaucccgugaggacuaguuauaagacugacuagcccgaugggccucccaacgggcccuccuccccuccuugcaccgagauuaauaaaaaaaaaaaaaaaaaaaaaaaaaaaaaaaaaaaaaaaaaaaaaaaaaaaaaaaaaaaaaaaaaaaaaaaaaaaaaaaaaaaaaaaaaaaaaaaaaaaa

SEQ ID NO: 43204 - RNA, 1551 nt, Artificial Sequence
  mRNA product Design i-3 (A100) comprising derived and/or modified sequence from LASV(Z0947-SLE-2011;Clade IV)__AIT17840__GPCmut13 (opt1)
aggagaaagcuuaccaugggccagaucgugaccuucuuccaggaggucccccacgugaucgaggaggugaugaacaucguccugaucgcccucagcauccuggccgugcugaaggggcucuacaacuucgcgaccugcggccugguggggcuggucacguuccuccugcugugcggccgcuccugcaccaucagccucuacaaggggguguacgagcugcagacccuggagcucaacauggagacccugaacaugacgaugccgcuguccugcaccaagaacaacagccaccacuacaucauggugggcaacgagaccggccucgagcugacccugacgaacaccuccaucaucaaccacaaguucugcaaccucagcgacgcccacaagaagaaccuguacgaccacgcccugauguccaucaucagcaccuuccaccucuccauccccaacuucaaccaguacgaggccaugagcugcgacuucaacgggggcaagaucuccguccaguacaaccugagccacuccuacgccggggacgcggccaaccacugcggcaccguggccaacggggugcugcagacguucaugcggauggccuggggcggcagcuacaucgcgcucgacuccgggcgcgaccggugggacugcaucaugaccagcuaccaguaccugaucauccagaacaccaccugggaggaccacugccaguucucccgccccagccccaucggcuaccuggggcuccugucccagcggacgcgcgacaucuacaucagccggcgccugcucggcaccuucaccuggacccugagcgacuccgagggcaaggacacgcccgggggcuacugccugacccgguggaugcucaucgaggccgagcugaagugcuucgggaacaccgccgucgccaagugcaacgagaagcacgacgaggaguucugcgacaugcugcgccucuucgacuucaacaagcaggccauccagcggcugaaggcggaggcccagaugagcauccagcugaucaacaaggccgugaacgcccucaucaacgaccagcugaucaugaagaaccaccuccgcgacaucaugggcauccccuacugcaacuacuccaaguacugguaccugaaccacaccacgaccgggaagaccagccugcccaagugcuggcugguguccaacggcagcuaccucaacgagacccacuucuccgacgacaucgagcagcaggccgacaacaugaucacggagaugcugcagaaggaguacauggagcggcagggcaagaccccgcuggggcucgucgaccuguucguguucagcaccuccuucuaccugaucagcaucuuccugcaccucgugaagaucccgugaggacuaguuauaagacugacuagcccgaugggccucccaacgggcccuccuccccuccuugcaccgagauuaauaaaaaaaaaaaaaaaaaaaaaaaaaaaaaaaaaaaaaaaaaaaaaaaaaaaaaaaaaaaaaaaaaaaaaaaaaaaaaaaaaaaaaaaaaaaaaaaaaaaa

SEQ ID NO: 43205 - RNA, 1551 nt, Artificial Sequence
  mRNA product Design i-3 (A100) comprising derived and/or modified sequence from LASV(Josiah;Clade IV)__NP_694870__GPCmut13 (opt1)
aggagaaagcuuaccaugggccagaucgugaccuucuuccaggaggucccccacgugaucgaggaggugaugaacaucguccugaucgcccucagcgugcuggccgugcugaaggggcucuacaacuucgcgaccugcggccuggucgggcuggugacguuccuccugcugugcggccgcuccugcaccaccagccucuacaaggggguguacgagcugcagacccuggagcucaacauggagacgcugaacaugaccaugccgcuguccugcaccaagaacaacagccaccacuacaucauggucggcaacgagaccggccucgagcugacgcugaccaacaccuccaucaucaaccacaaguucugcaaccucagcgacgcccacaagaagaaccuguacgaccacgcccugauguccaucaucagcaccuuccaccucuccauccccaacuucaaccaguacgaggccaugagcugcgacuucaacgggggcaagaucuccgugcaguacaaccugagccacuccuacgccggggacgcggccaaccacugcggcacgguggccaacgggguccugcagaccuucaugcggauggccuggggcggcagcuacaucgcgcucgacuccgggcgcggcaacugggacugcaucaugaccagcuaccaguaccugaucauccagaacaccacgugggaggaccacugccaguucucccggcccagccccaucggguaccugggccuccugucccagcgcacccgggacaucuacaucagccgccggcugcucggcaccuucaccuggacgcugagcgacuccgaggggaaggacaccccgggcggguacugccugacccgcuggaugcucaucgaggccgagcugaagugcuucggcaacaccgccguggccaagugcaacgagaagcacgacgaggaguucugcgacaugcugcggcuguucgacuucaacaagcaggccauccagcgccugaaggcggaggcccagaugagcauccagcugaucaacaaggccgugaacgcccucaucaacgaccagcugaucaugaagaaccaccuccgggacaucauggggauccccuacugcaacuacuccaaguacugguaccucaaccacacgaccaccggccgcaccagccugcccaagugcuggcuggucuccaacggcagcuaccucaacgagacgcacuucuccgacgacaucgagcagcaggccgacaacaugaucaccgagaugcugcagaaggaguacauggagcggcaggggaagacgccccugggccugguggaccucuucguguucagcaccuccuucuaccugaucagcaucuuccugcaccucgucaagaucccgugaggacuaguuauaagacugacuagcccgaugggccucccaacgggcccuccuccccuccuugcaccgagauuaauaaaaaaaaaaaaaaaaaaaaaaaaaaaaaaaaaaaaaaaaaaaaaaaaaaaaaaaaaaaaaaaaaaaaaaaaaaaaaaaaaaaaaaaaaaaaaaaaaaaa

SEQ ID NO: 43206 - RNA, 1548 nt, Artificial Sequence
  mRNA product Design i-3 (A100) comprising derived and/or modified sequence from LASV(LP;Clade I)__AAF86701__GPCmut13 (opt1)
aggagaaagcuuaccaugggccagaucaucaccuucuuccaggaggugccccacgucaucgaggaggugaugaacaucgugcugaucgcccucagccugcuggccauccucaaggggcuguacaacaucgcgaccugcggcaucaucgggcuggucgccuuccucuuccugugcggcaaguccugcagccugacgcucaagggcggguacgagcugcagacccuggagcucaacauggagacccugaacaugaccaugccgcuguccugcacgaagaacagcucccaccacuacauccgcgugggcaacgagaccgggcucgagcugacccugaccaacacgagcaucaucaaccacaaguucugcaaccucuccgacgcccacaagaagaaccuguacgaccacgcccugaugagcaucaucuccaccuuccaccucagcauccccaacuucaaccaguacgaggccauguccugcgacuucaacggcgggaagaucagcgugcaguacaaccugucccacagcuacgcgggcgacgccgccgagcacugcgggaccgucgccaacggcgugcugcagaccuucaugcggauggcguggggcgggcgcuacaucgcccucgacuccggcaaggggaacugggacugcaucaugacgagcuaccaguaccugaucauccagaacaccaccugggaggaccacugccaguucucccggcccagccccaucggcuaccugggccuccugucccagcgcacccgggacaucuacaucagccgccggcugcucgggacguucaccuggacccugagcgacuccgagggcaacgagacccccgggggcuacugccugacgcgcuggaugcucaucgaggccgagcugaagugcuucgggaacaccgccguggccaagugcaacgagaagcacgacgaggaguucugcgacaugcugcggcuguucgacuucaacaagcaggcgauccgccggcugaaggccgaggcccagaugagcauccagcugaucaacaaggccgucaacgcccucaucaacgaccagcugaucaugaagaaccaccuccgcgacaucaugggcauccccuacugcaacuacuccaaguacugguaccucaaccacaccagcuccggccggaccagccugcccaagugcuggcugaucuccaacgggagcuaccucaacgagacgcaguucuccgacgacaucgagcagcaggcggacaacaugaucaccgagaugcugcagaaggaguacaucgagcgccagggcaagaccccgcuggggcugguggacaucuucaucuucagcaccuccuucuaccucaucagcaucuuccugcaccugaucaagaucccgugaggacuaguuauaagacugacuagcccgaugggccucccaacgggcccuccuccccuccuugcaccgagauuaauaaaaaaaaaaaaaaaaaaaaaaaaaaaaaaaaaaaaaaaaaaaaaaaaaaaaaaaaaaaaaaaaaaaaaaaaaaaaaaaaaaaaaaaaaaaaaaaaaaaa

SEQ ID NO: 43207 - RNA, 1548 nt, Artificial Sequence
  mRNA product Design i-3 (A100) comprising derived and/or modified sequence from LASV(803213;Clade II)__AAF86703__GPCmut13 (opt1)
aggagaaagcuuaccaugggccagaucaucaccuucuuccaggaggugccccacgucaucgaggaggugaugaacaucgugcugaucgcccucagccugcuggccauccucaaggggaucuacaacgucgcgaccugcggccuguucgggcugaucuccuuccuccugcugugcggccgcagcugcuccgugacguacaaggggguguacgagcuccagacccuggagcugaacauggccaaccucaacaugaccaugccgcugagcugcaccaagaacaacucccaccacuacaucauggucggcaacgagacgggccuggagcucacccugaccaacaccagcaucaucaaccacaaguucugcaaccuguccgacgcccacaagaagaaccucuacgaccacgcccugaugagcaucaucuccacguuccaccugagcauccccaacuucaaccaguacgaggccauguccugcgacuucaacgggggcaagaucagcgugcaguacaaccucucccacagcuucgcgguggacgccgccaaccacugcgggaccaucgccaacggcguccugcagaccuucaugcggauggcguggggcggguccuacaucgcccuggacagcggcaaggggaacugggacugcaucaugaccuccuaccaguaccucaucauccagaacacgaccugggaggaccacugccaguucagccgccccucccccaucggcuaccuggggcugcucagccagcggacccgcgacaucuacaucagccggcgccugcugggcaccuucacguggacccucuccgacagcgagggcaacgaggcccccgggggcuacugccugacccgguggaugcugaucgaggccgagcucaagugcuucgggaacaccgccguggcgaagugcaacgagaagcacgacgaggaguucugcgacaugcugcgccuguucgacuucaacaagcaggccaucaagcggcucaagacggaggcccagauguccauccagcugaucaacaaggccgugaacgcccugaucaacgaccagcucaucaugaagaaccaccuccgcgacaucaugggcauccccuacugcaacuacagccgguacugguaccugaaccacaccgucaccgggaagaccucccugccccgcugcuggcuggugagcaacggcuccuaccugaacgagacgcacuucagcgacgacaucgagcagcaggcggacaacaugaucaccgagaugcuccagaaggaguacauggaccggcagggcaagaccccgcuggggcugguggaccuguucgucuucuccaccagcuucuaccucaucuccaucuuccugcaccuggugaagaucccgugaggacuaguuauaagacugacuagcccgaugggccucccaacgggcccuccuccccuccuugcaccgagauuaauaaaaaaaaaaaaaaaaaaaaaaaaaaaaaaaaaaaaaaaaaaaaaaaaaaaaaaaaaaaaaaaaaaaaaaaaaaaaaaaaaaaaaaaaaaaaaaaaaaaa

SEQ ID NO: 43208 - RNA, 1548 nt, Artificial Sequence
  mRNA product Design i-3 (A100) comprising derived and/or modified sequence from LASV(GA391;Clade III)__CAA36645__GPCmut13 (opt1)
aggagaaagcuuaccaugggccagaucgugaccuucuuccaggaggucccccacgugaucgaggaggugaugaacaucguccugaucgcccucagcauccuggccauccugaaggggcucuacaacguggcgaccugcggccugaucgggcuggugacguuccuccugcuguccggccgcagcugcucccucaucuacaaggggaccuacgagcugcagacccuggagcucaacauggagacccugaacaugacgaugccgcugagcugcaccaagaacaacucccaccacuacauccgggucggcaacgagaccggccucgagcugacccugacgaacaccagcauccucaaccacaaguucugcaaccuguccgacgcccacaagcgcaaccuguacgaccacagccucauguccaucaucagcaccuuccaccuguccauccccaacuucaaccaguacgaggccaugagcugcgacuucaacgggggcaagaucaccgugcaguacaaccugucccacagcuucgccguggacgccgcggggcacugcggcacgcucgccaacgggguccugcagaccuucaugcggauggccuggggcggcuccuacaucgcccuggacagcgggcgcggcaacugggacugcaucaugaccuccuaccaguaccucaucauccagaacaccacgugggacgaccacugccaguucagccggcccucccccaucggguaccugggccugcucagccagcgcacccgggacaucuacaucagccgccggcugcugggcaccuucaccuggacgcucuccgacagcgaggggaacgagaccccgggcggguacugccugacccgcuggaugcugaucgaggcggagcucaagugcuucggcaacaccgccguggccaagugcaacgagaagcacgacgaggaguucugcgacaugcugcggcuguucgacuucaacaagcaggccauccgccggcucaagacggaggcccagauguccauccagcugaucaacaaggcggugaacgcccugaucaacgaccagcucaucaugaagaaccaccuccgcgacaucauggggauccccuacugcaacuacagccgguacugguaccugaaccacaccuccaccggcaagaccagccugccccgcugcuggcugaucuccaacggcagcuaccugaacgagacgaaguucuccgacgacaucgagcagcaggccgacaacaugaucaccgagaugcugcagaaggaguacaucgaccggcaggggaagacgccccucggccuggucgaccuguucguguucagcaccuccuucuaccucaucagcaucuuccugcaccuggugaagaucccgugaggacuaguuauaagacugacuagcccgaugggccucccaacgggcccuccuccccuccuugcaccgagauuaauaaaaaaaaaaaaaaaaaaaaaaaaaaaaaaaaaaaaaaaaaaaaaaaaaaaaaaaaaaaaaaaaaaaaaaaaaaaaaaaaaaaaaaaaaaaaaaaaaaaa

SEQ ID NO: 43209 - RNA, 1551 nt, Artificial Sequence
  mRNA product Design i-3 (A100) comprising derived and/or modified sequence from LASV(AV;Clade V)__CCA30314__GPCmut13 (opt1)
aggagaaagcuuaccaugggccagaucgugaccuucuuccaggaggucccccacgugaucgaggaggugaugaacaucguccugaucgcccucagcauccuggccgugcugaaggggcucuacaacaucgcgaccugcggccugaucgggcugaucacguuccuccugcugugcggccgcuccugcagcuccaaccucuacaaggggguguacgagcugcagagccuggaccucaacauggagacccugaacaugaccaugccgcuguccugcaccaagaacaacagccaccacuacauccgggucggcaacgacacgggccucgagcugacccugaccaacaccuccauccucaaccacaaguucugcaaccugagcgacgcccacaagaaggaccuguacgaccacgcccucauguccaucaucagcacguuccaccuguccauccccaacuucaaccaguacgaggccaugagcugcgacuucaacgggggcaagaucuccgugcaguacaaccugagccacuccuacgccaucgacgcggccaaccacugcgggaccguggccaacggcauccuccagaccuucaugcgcauggccuggggcgggagcuacaucgcgcuggacuccggccgggggaacugggacugcaucaugaccagcuaccaguaccugaucauccagaacacgaccugggagaaccacugccaguucucccgccccagccccaucggcuaccucgggcugcugagccagcggacccgcgacaucuacaucucccggcgccuccugggcaccuucacguggacccugagcgacuccgagggcaacgccacccccgggggcuacugccucacccgguggaugcugaucgaggccgagcugaagugcuucgggaacacggccgucgccaagugcaacgagaagcacgacgaggaguucugcgacaugcuccgccuguucgacuucaacaagcaggcgaucagccggcugaaguccgaggcccagaugagcauccagcucaucaacaaggccgugaacgcccugaucaacgaccagcugaucaugaagaaccaccuccgcgacaucaugggcauccccuacugcaacuacuccaaguacugguaccugaaccacaccaucaccgggaagaccagccugcccaagugcuggcucguguccaacggcagcuaccugaacgagacgcacuucuccgacgacaucgagcagcaggccgacaacaugaucaccgagaugcugcagaaggaguacauggagcggcagggcaagaccccgcuggggcucgucgaccuguucguguucagcaccuccuucuaccugaucagcaucuuccuccgccuggugaagaucccgugaggacuaguuauaagacugacuagcccgaugggccucccaacgggcccuccuccccuccuugcaccgagauuaauaaaaaaaaaaaaaaaaaaaaaaaaaaaaaaaaaaaaaaaaaaaaaaaaaaaaaaaaaaaaaaaaaaaaaaaaaaaaaaaaaaaaaaaaaaaaaaaaaaaa

SEQ ID NO: 43210 - RNA, 1548 nt, Artificial Sequence
  mRNA product Design i-3 (A100) comprising derived and/or modified sequence from LASV(Togo/2016/7082;Clade VI)__AMR44577__GPCmut13 (opt1)
aggagaaagcuuaccaugggccagaucaucaccuucuuccaggaggugccccacgucaucgaggaggugaugaacaucgugcugaucgcccucagccugcuggccauccucaagggggucuacaacguggcgaccugcggcaucaucgggcuggugacguuccuguuccucugcggccgcuccugcagccugaucuacaagggguccuacgagcugcagacccucgagcugaacauggagacccugaacaugaccaugccgcucagcugcacgaagaacuccagccaccacuacauccgggucggcaacgagaccggccuggagcugacccucaccaacacguccaucaucaaccacaaguucugcaaccugagcgacgcccacaagcgcaaccuguacgaccacgcccucauguccauccugagcaccuuccaccuguccauccccaacuucaaccaguacgaggccaugagcugcgacuucaacgggggcaagaucuccgugcaguacaaccucagccacgccuacgcgguggacgccgccgagcacugcgggaccgucgccaacggcgugcugcagaccuucaugcggauggcguggggcggguccuacaucgcccuggacagcggccgcgggaacugggacugcaucaugacguccuaccaguaccucaucauccagaacaccaccugggaggaccacugccaguucagccggcccucccccaucggcuaccuggggcugcucagccagcgcacccgggacaucuacaucagccgccggcugcugggcacguucaccuggacccucuccgacagcgagggcaacgagacccccgggggcuacugccugacgcgcuggaugcugaucgaggccgagcucaagugcuucgggaacaccgccguggccaagugcaacgagaagcacgacgaggaguucugcgacaugcugcggcuguucgacuucaacaagcaggcgauccagcgccucaaguccgaggcccagaugagcauccagcugaucaacaaggccgucaacgcccugaucaacgaccagcucaucaugaagaaccaccuccgggacaugaugggcauccccuacugcaacuacuccaaguacugguaccugaaccacaccagcuccgggcgcaccagccugcccaagugcuggcugguguccaacggcagcuaccugaacgagacgcacuucuccgacgacaucgagcagcaggccgacaacaugaucaccgagaugcuccagaaggaguacaucgaccggcagggcaagaccccgcuggggcugguggaccuguucgucuucagcaccuccuucuaccucaucagcaucuuccugcaccugaucaagaucccgugaggacuaguuauaagacugacuagcccgaugggccucccaacgggcccuccuccccuccuugcaccgagauuaauaaaaaaaaaaaaaaaaaaaaaaaaaaaaaaaaaaaaaaaaaaaaaaaaaaaaaaaaaaaaaaaaaaaaaaaaaaaaaaaaaaaaaaaaaaaaaaaaaaaa

SEQ ID NO: 43211 - RNA, 1548 nt, Artificial Sequence
  mRNA product Design i-3 (A100) comprising derived and/or modified sequence from LASV(KAK-428;Clade n.d. (VII))__ANH09740__GPCmut13 (opt1)
aggagaaagcuuaccaugggccagaucgugaccuucuuccaggaggucccccacgugaucgaggaggugaugaacaucguccugaucgcccucagccugcuggccauccucaaggggcuguacaacuucgcgaccugcggcgugaucgggcugaucacguuccuccugcugugcggccgcuccugcagcgccaccuacaaggggcaguacgagcuccagacccuggagcugaacauggagucccucaacaugaccaugccgcugagcugcacgaagaacaacucccaccacuacauccgggccggcaacaacaccggccuggagcucacccugaccaacacgagcaucaucucccacaaguucugcaaccugagcgacgcccacaagaagaaccucuacgaccacacccugauguccaucaucaccaccuuccaccugagcauccccaacuucaaccaguacgaggccauguccugcgacuucaacgggggcaagaucagcauccaguacaaccucucccacagcuacgcgggggacgccgcccagcacugcggcacgguggccaacgggguccugcagaccuucaugcgcauggcguggggcggcuccuaccuggcccucgacagcgggcggcgcggcugggacugcaucaucuccagcuaccaguaccugaucauccagaacaccaccugggacgaccacugccaguucucccggcccagccccaucggguaccugggcuucgugagccagaagacgcgcgacaucuacaucucccggcgccuccugggcaccuucaccuggacccugagcgacuccgaggggcacgacaugccgggcggguacugccucacgcgguggaugcugaucgaggccgaccugaagugcuucggcaacaccgccguggccaagugcaacgagaagcacgacgaggaguucugcgacauguggcgccucuucgacuucaacaagcaggcgauccagcggcugaaggccgaggcccagaugaacauccagcugaucaacaaggccgucaacgcccucaucaacgaccagcugaugaugaagaaccaccuccgcgacaucauggggauccccuacugcaacuacagcaaguucugguaccugaacaacaccaccacgggccggaccucccugccccgcugcuggcugaucagcaacggcuccuaccucaacgagacccacuucagcgacgacaucgagcagcaggcggacaacaugaucaccgagaugcugcagaaggaguacauggaccggcaggggaagacgccccugggccucguggaccuguucguguucuccaccagcuucuaccugaucaccaucuuccugcaccucgucaagaucccgugaggacuaguuauaagacugacuagcccgaugggccucccaacgggcccuccuccccuccuugcaccgagauuaauaaaaaaaaaaaaaaaaaaaaaaaaaaaaaaaaaaaaaaaaaaaaaaaaaaaaaaaaaaaaaaaaaaaaaaaaaaaaaaaaaaaaaaaaaaaaaaaaaaaa

SEQ ID NO: 43212 - RNA, 1548 nt, Artificial Sequence; identical to SEQ ID NO: 43206
  mRNA product Design i-3 (A100) comprising derived and/or modified sequence from LASV(Pinneo-NIG-1969;Clade I)__AIT17836__GPCmut13 (opt1)

SEQ ID NO: 43213 - RNA, 1548 nt, Artificial Sequence
  mRNA product Design i-3 (A100) comprising derived and/or modified sequence from LASV(ISTH0009-NIG-2011;Clade II)__AIT17404__GPCmut13 (opt1)
aggagaaagcuuaccaugggccagaucaucaccuucuuccaggaggugccccacgucaucgaggaggugaugaacaucgugcugaucgcccucagccugcuggccauccucaaggggaucuacaacgucgcgaccugcggccuguucgggcugguguccuuccuccugcugugcggccgcagcugcuccacgaccuacaaggggguguacgagcuccagacccuggagcuggacauggccagccucaacaugaccaugccgcuguccugcacgaagaacaacagccaccacuacaucauggucggcaacgagaccggccuggagcucacccugaccaacacguccaucaucaaccacaaguucugcaaccugagcgacgcccacaagaagaaccucuacgaccacgcccugauguccaucaucagcaccuuccaccuguccauccccaacuucaaccaguacgaggccaugagcugcgacuucaacgggggcaagaucuccgugcaguacaaccucagccacgcguacgccguggacgccgccaaccacugcgggaccaucgcgaacggcguccugcagaccuucaugcggauggccuggggcggguccuacaucgcccuggacagcggcaagggguccugggacugcaucaugacgagcuaccaguaccucaucauccagaacaccaccugggaggaccacugccaguucucccgccccagccccaucggcuaccuggggcugcucagccagcggacccgcgacaucuacaucucccggcgccugcugggcacguucaccuggacccucagcgacuccgagggcaacgagacccccgggggcuacugccugacgcgguggaugcugaucgaggccgagcucaagugcuucgggaacaccgccguggcgaagugcaacgagaagcacgacgaggaguucugcgacaugcugcgccuguucgacuucaacaagcaggccauccggcgccucaagaccgaggcccagaugagcauccagcugaucaacaaggccgugaacgcccugaucaacgaccagcucaucaugaagaaccaccuccgggacaucaugggcaucccguacugcaacuacuccaaguacugguaccugaaccacaccgucacggggaagaccagccugccccgcugcuggcugguguccaacggcagcuaccugaacgagacccacuucuccgacgacaucgagcagcaggcggacaacaugaucaccgagcuccugcagaaggaguacauggaccggcagggcaagacgccccuggggcugguggaccucuucgucuucagcaccuccuucuaccugaucagcaucuuccugcaccucaucaagaucccgugaggacuaguuauaagacugacuagcccgaugggccucccaacgggcccuccuccccuccuugcaccgagauuaauaaaaaaaaaaaaaaaaaaaaaaaaaaaaaaaaaaaaaaaaaaaaaaaaaaaaaaaaaaaaaaaaaaaaaaaaaaaaaaaaaaaaaaaaaaaaaaaaaaaa

SEQ ID NO: 43214 - RNA, 1548 nt, Artificial Sequence
  mRNA product Design i-3 (A100) comprising derived and/or modified sequence from LASV(ISTH2010-NIG-2012;Clade II)__AIT17482__GPCmut13 (opt1)
aggagaaagcuuaccaugggccagaucaucaccuucuuccaggaggugccccacgucaucgaggaggugaugaacaucgugcugaucgcccucagccugcuggccauccucaaggggaucuacaacgucgcgaccugcggccuguucgggcugguguccuuccuccugcugugcggccgcagcugcuccacgaccuacaaggggguguacgagcuccagacccuggagcuggacauggccagccucaacaugaccaugccgcuguccugcacgaagaacaacagccaccacuacaucauggucggcaacgagaccggccuggagcucacccugaccaacacguccaucaucaaccacaaguucugcaaccugagcgacgcccacaagaagaaccucuacgaccacgcccugauguccaucaucagcaccuuccaccuguccauccccaacuucaaccaguacgaggccaugagcugcgacuucaacgggggcaagaucuccgugcaguacaaccucagccacgcguacgccguggacgccgccaaccacugcgggaccaucgcgaacggcguccugcagaccuucaugcggauggccuggggcggguccuacaucgcccuggacagcggcaagggguccugggacugcaucaugacgagcuaccaguaccucaucauccagaacaucaccugggaggaccacugccaguucucccgccccagccccaucggcuaccuggggcugcucagccagcggacccgcgacaucuacaucucccggcgccugcugggcaccuucacguggacccucagcgacuccgagggcaacgagacccccgggggcuacugccugacccgguggaugcugaucgaggccgagcucaagugcuucgggaacacggccguggcgaagugcaacgagaagcacgacgaggaguucugcgacaugcugcgccuguucgacuucaacaagcaggccauccggcgccucaagaccgaggcccagaugagcauccagcugaucaacaaggccgugaacgcccugaucaacgaccagcucaucaugaagaaccaccuccgggacaucaugggcauccccuacugcaacuacuccaaguacugguaccugaaccacaccgucaccgggaagacgagccugccccgcugcuggcugguguccaacggcagcuaccugaacgagacccacuucuccgacgacaucgagcagcaggcggacaacaugaucaccgagcuccugcagaaggaguacaucgaccggcagggcaagaccccgcuggggcugguggaccucuucgucuucagcacguccuucuaccugaucagcaucuuccugcaccucgugaagaucccgugaggacuaguuauaagacugacuagcccgaugggccucccaacgggcccuccuccccuccuugcaccgagauuaauaaaaaaaaaaaaaaaaaaaaaaaaaaaaaaaaaaaaaaaaaaaaaaaaaaaaaaaaaaaaaaaaaaaaaaaaaaaaaaaaaaaaaaaaaaaaaaaaaaaa

SEQ ID NO: 43215 - RNA, 1548 nt, Artificial Sequence
  mRNA product Design i-3 (A100) comprising derived and/or modified sequence from LASV(Lassa virus/H.sapiens-wt/NGA/2015/ISTH_0543;Clade II)__AVO03639__GPCmut13 (opt1)
aggagaaagcuuaccaugggccagaucaucaccuucuuccaggaggugccccacgucaucgaggaggugaugaacaucgugcugaucgcccucagccugcuggccauccucaaggggaucuacaacgucgcgaccugcggccuguucgggcugguguccuuccuccugcugugcggccgcagcugcuccacgaccuacaaggggguguacgagcuccagacccuggagcuggacauggccaaccucaacaugaccaugccgcugagcugcacgaagaacaacucccaccacuacaucauggucggcaacgagaccggccuggagcucacccugaccaacacgagcaucaucaaccacaaguucugcaaccuguccgacgcccacaagaagaaccucuacgaccacgcccugaugagcaucaucuccaccuuccaccugagcauccccaacuucaaccaguacgaggccauguccugcgacuucaacgggggcaagaucagcgugcaguacaaccucucccacaccuacgcgguggacgccgccaaccacugcgggaccaucgccaacggcguccugcagacguucaugcggauggcguggggcgggagcuacaucgcccuggacuccggcaaggggagcugggacugcaucaugaccuccuaccaguaccucgugauccagaacaccaccugggaggaccacugccaguucagccgccccucccccaucggcuaccuggggcugcucagccagcggacgcgcgacaucuacaucagccggcgccugcugggcaccuucaccuggacccucuccgacagcgagggcaacgagacgcccgggggcuacugccugacccgguggaugcugaucgaggccgagcucaagugcuucgggaacaccgccguggccaagugcaacgagaagcacgacgaggaguucugcgacaugcugcgccuguucgacuucaacaagcaggcgauccggcgccucaagaccgaggcccagauguccauccagcugaucaacaaggccgucaacgcccugaucaacgaccagcucaucaugaagaaccaccuccgggacaucaugggcauccccuacugcaacuacagcaaguacugguaccugaaccacacggugaccgggaagaccucccugccccgcugcuggcuggugagcaacggcuccuaccugaacgagacccacuucagcgacgacaucgagcagcaggccgacaacaugaucacggagcuccugcagaaggaguacaucgaccggcagggcaagaccccgcuggggcuggucgaccucuucguguucuccaccagcuucuaccugaucuccaucuuccugcaccucgugaagaucccgugaggacuaguuauaagacugacuagcccgaugggccucccaacgggcccuccuccccuccuugcaccgagauuaauaaaaaaaaaaaaaaaaaaaaaaaaaaaaaaaaaaaaaaaaaaaaaaaaaaaaaaaaaaaaaaaaaaaaaaaaaaaaaaaaaaaaaaaaaaaaaaaaaaaa

SEQ ID NO: 43216 - RNA, 1548 nt, Artificial Sequence
  mRNA product Design i-3 (A100) comprising derived and/or modified sequence from LASV(Lassa virus/H.sapiens-wt/NGA/2016/ISTH_0009;Clade II)__AVO03571__GPCmut13 (opt1)
aggagaaagcuuaccaugggccagaucaucaccuucuuccaggaggugccccacgucaucgaggaggugaugaacaucgugcugaucgcccucagccugcuggccauccucaaggggaucuacaacgucgcgaccugcggccugcuggggcucguguccuuccugcugcucugcggccgcagcugcuccacgaccuacaaggggguguacgagcugcagacccuggagcucgacauggccagccugaacaugaccaugccgcuguccugcacgaagaacaacagccaccacuacaucauggucggcaacgagaccggccucgagcugacccugaccaacacguccaucaucaaccacaaguucugcaaccucagcgacgcccacaagaagaaccuguacgaccacgcccugauguccaucaucagcaccuuccaccucuccauccccaacuucaaccaguacgaggccaugagcugcgacuucaacgggggccggaucuccgugcaguacaaccugagccacuccuacgcgguggacgccgccaaccacugcgggaccaucgccaacggcguccugcagaccuucaugcgcauggcguggggcgggagcuacaucgcccucgacuccggcaaggggagcugggacugcaucaugacguccuaccaguaccugaucauccagaacaccaccugggaggaccacugccaguucagccggcccagccccaucggcuaccuggggcuccugucccagcgcacccgggacaucuacaucagccgccggcugcucggcacguucaccuggacccuguccgacagcgagggcaacgagacccccgggggcuacugccugacgcgcuggaugcucaucgaggccgagcugaagugcuucgggaacaccgccguggccaagugcaacgagaagcacgacgaggaguucugcgacaugcugcggcuguucgacuucaacaagcaggcgauccgccggcugaagaccgaggcccagauguccauccagcugaucaacaaggccgugaacgcccucaucaacgaccagcugaucaugaagaaccaccuccgcgacaucaugggcaucccguacugcaacuacagcaaguacugguaccucaaccacaccgucacggggaagaccucccugccccggugcuggcuggugagcaacggcuccuaccucaacgagacccacuucagcgacgacaucgagcagcaggccgacaacaugaucaccgagcugcugcagaaggaguacaucgaccgccagggcaagacgccccuggggcucguggaccuguucgucuucuccaccagcuucuaccugaucuccaucuuccuccaccuggugaagaucccgugaggacuaguuauaagacugacuagcccgaugggccucccaacgggcccuccuccccuccuugcaccgagauuaauaaaaaaaaaaaaaaaaaaaaaaaaaaaaaaaaaaaaaaaaaaaaaaaaaaaaaaaaaaaaaaaaaaaaaaaaaaaaaaaaaaaaaaaaaaaaaaaaaaaa

SEQ ID NO: 43217 - RNA, 1548 nt, Artificial Sequence
  mRNA product Design i-3 (A100) comprising derived and/or modified sequence from LASV(Lassa virus/H.sapiens-wt/NGA/2016/ISTH_0017;Clade II)__AVO03567__GPCmut13 (opt1)
aggagaaagcuuaccaugggccagaucaucaccuucuuccaggaggugccccacgucaucgaggaggugaugaacaucgugcugaucgcccucagccugcuggccauccucaaggggaucuacaacgucgcgaccugcggccuguucgggcugguguccuuccuccugcugugcggccgcagcugcuccacgaccuacaaggggguguacgagcuccagacccuggagcuggacauggccagccucaacaugaccaugccgcuguccugcacgaagaacaacagccaccacuacaucauggucggcaacgagaccggccuggagcucacccugaccaacacguccaucaucaaccacaaguucugcaaccugagcgacgcccacaagaagaaccucuacgaccacgcccugauguccaucaucagcaccuuccaccuguccauccccaacuucaaccaguacgaggccaugagcugcgacuucaacgggggcaagaucuccgugcaguacaaccucagccacaccuacgcgaucgacgccgccaaccacugcgggaccaucgccaacggcgugcugcagacguucaugcggauggcguggggcggguccuacaucgcccuggacagcggcaagggguccugggacugcaucaugaccagcuaccaguaccucaucauccagaacaccaccugggaggaccacugccaguucucccgccccagccccaucggcuaccuggggcugcucagccagcggacgcgcgacaucuacaucucccggcgccugcugggcaccuucaccuggacccucagcgacuccgagggcaacgagacgcccgggggcuacugccugacccgguggaugcugaucgaggccgagcucaagugcuucgggaacaccgccgucgccaagugcaacgagaagcacgacgaggaguucugcgacaugcugcgccuguucgacuucaacaagcaggcgauccggcgccucaagaccgaggcccagaugagcauccagcugaucaacaaggccgugaacgcccugaucaacgaccagcucaucaugaagaaccaccuccgggacaucaugggcauccccuacugcaacuacuccaaguacugguaccugaaccacacggugaccgggaagaccagccugccccgcugcuggcuggucuccaacggcagcuaccugaacgagacccacuucuccgacgacaucgagcagcaggccgacaacaugaucacggagcuccugcagaaggaguacauggaccggcagggcaagaccccgcuggggcugguggaccucuucguguucagcaccuccuucuaccugaucagcaucuuccugcaccucguccgcaucccgugaggacuaguuauaagacugacuagcccgaugggccucccaacgggcccuccuccccuccuugcaccgagauuaauaaaaaaaaaaaaaaaaaaaaaaaaaaaaaaaaaaaaaaaaaaaaaaaaaaaaaaaaaaaaaaaaaaaaaaaaaaaaaaaaaaaaaaaaaaaaaaaaaaaa

SEQ ID NO: 43218 - RNA, 1548 nt, Artificial Sequence
  mRNA product Design i-3 (A100) comprising derived and/or modified sequence from LASV(Lassa virus/H.sapiens-wt/NGA/2018/ISTH_0959;Clade II)__AVV65099__GPCmut13 (opt1)
aggagaaagcuuaccaugggccagaucaucaccuucuuccaggaggugccccacgucaucgaggaggugaugaacaucgugcugaucgcccucagccugcuggccauccucaaggggaucuacaacgucgugaccugcggccuguucgggcugguguccuuccuccugcugugcggccgcagcugcuccacgaccuacaagggggucuacgagcuccagacccuggagcuggacauggcgagccucaacaugaccaugccgcuguccugcacgaagaacaacagccaccacuacaucauggugggcaacgagaccggccuggagcucacccugaccaacacguccaucaucaaccacaaguucugcaaccugagcgacgcccacaagaagaaccucuacgaccacgcccugauguccaucaucagcaccuuccaccuguccauccccaacuucaaccaguacgaggccaugagcugcgacuucaacgggggcaagaucuccgugcaguacaaccucagccacgccuacgcgaucgacgccgccaaccacugcgggaccaucgccaacggcguccugcagaccuucaugcggauggcguggggcggguccuacaucgcccuggacagcggcaagggguccugggacugcaucaugacgagcuaccaguaccucaucauccagaacaccaccugggaggaccacugccaguucucccgccccagccccaucggcuaccuggggcugcucagccagcggacccgcgacaucuacaucucccggcgccugcugggcacguucaccuggacccucagcgacuccgagggcaacgagacccccgggggcuacugccugacgcgguggaugcugaucgaggccgagcucaagugcuucgggaacaccgccguggccaagugcaacgagaagcacgacgaggaguucugcgacaugcugcgccuguucgacuucaacaagcaggcgauccggcgccucaagaccgaggcccagaugagcauccagcugaucaacaaggccgugaacgcccugaucaacgaccagcucaucaugaagaaccaccuccgggacaucaugggcaucccguacugcaacuacuccaaguacugguaccugaaccacaccgucacggggaagaccagccugccccgcugcuggcugguguccaacggcagcuaccugaacgagacccacuucuccgacgacaucgagcagcaggccgacaacaugaucaccgagcuccugcagaaggaguacaucgaccggcagggcaagacgccccuggggcugguggaccucuucgucuucagcaccuccuucuaccugaucagcaucuuccugcaccucgugaagaucccgugaggacuaguuauaagacugacuagcccgaugggccucccaacgggcccuccuccccuccuugcaccgagauuaauaaaaaaaaaaaaaaaaaaaaaaaaaaaaaaaaaaaaaaaaaaaaaaaaaaaaaaaaaaaaaaaaaaaaaaaaaaaaaaaaaaaaaaaaaaaaaaaaaaaa

SEQ ID NO: 43219 - RNA, 1548 nt, Artificial Sequence
  mRNA product Design i-3 (A100) comprising derived and/or modified sequence from LASV(LASV003-NIG-2008;Clade II)__AIT17580__GPCmut13 (opt1)
aggagaaagcuuaccaugggccagaucaucaccuucuuccaggaggugccccacgucaucgaggaggugaugaacaucgugcugaucgcccucagccugcuggccauccucaaggggaucuacaacgucgcgaccugcggccuguucgggcugguguccuuccuccugcugugcggccgcagcugcuccacgaccuacaaggggguguacgagcuccagacccuggagcuggacauggccagccucaacaugaccaugccgcuguccugcacgaagaacaacagccaccacuacaucauggucggcaacgagaccggccuggagcucacccugaccaacacguccaucaucaaccacaaguucugcaaccugagcgacgcccacaagaagaaccucuacgaccacgcccugauguccaucaucagcaccuuccaccuguccauccccaacuucaaccaguacgaggccaugagcugcgacuucaacgggggcaagaucuccgugcaguacaaccucagccacaccuacgcgguggacgccgccaaccacugcgggaccaucgccaacggcguccugcagacguucaugcggauggcguggggcggguccuacaucgcccuggacagcggcaagggguccugggacugcaucaugaccagcuaccaguaccucaucauccagaacaccaccugggaggaccacugccaguucucccgccccagccccaucggcuaccuggggcugcucagccagcggacgcgcgacaucuacaucucccggcgccugcugggcaccuucaccuggacccucagcgacuccgagagcaacgagacgccgggcggguacugccugacccgguggaugcugaucgaggccgagcucaagugcuucggcaacaccgccguggccaagugcaacgagaagcacgacgaggaguucugcgacaugcugcgccuguucgacuucaacaagcaggcgauccggcgccucaaggccgaggcccagauguccauccagcugaucaacaaggccgugaacgcccugaucaacgaccagcucaucaugaagaaccaccuccgggacaucauggggauccccuacugcaacuacagcaaguacugguaccugaaccacaccgucacgggccgcaccucccugccccggugcuggcuggugagcaacggguccuaccugaacgagacccacuucagcgacgacaucgagcagcaggcggacaacaugaucaccgagcuccugcagaaggaguacauggaccgccagggcaagacgccccugggccugguggaccucuucgucuucuccaccagcuucuaccugaucuccaucuuccugcaccucgugaagaucccgugaggacuaguuauaagacugacuagcccgaugggccucccaacgggcccuccuccccuccuugcaccgagauuaauaaaaaaaaaaaaaaaaaaaaaaaaaaaaaaaaaaaaaaaaaaaaaaaaaaaaaaaaaaaaaaaaaaaaaaaaaaaaaaaaaaaaaaaaaaaaaaaaaaaa

SEQ ID NO: 43220 - RNA, 1548 nt, Artificial Sequence
  mRNA product Design i-3 (A100) comprising derived and/or modified sequence from LASV(LASV035-NIG-2009;Clade II)__AIT17588__GPCmut13 (opt1)
aggagaaagcuuaccaugggccagaucaucaccuucuuccaggaggugccccacgucaucgaggaggugaugaacaucgugcugaucgcccucagccugcuggccauccucaaggggaucuacaacgucgcgaccugcggccuguucgggcugguguccuuccuccugcugugcggccgcagcugcuccacgaccuacaaggggguguacgagcuccagacccuggagcuggacauggccagccucaacaugaccaugccgcuguccugcacgaagaacaacagccaccacuacaucauggucggcaacgagaccggccuggagcucacccugaccaacacguccaucaucaaccacaaguucugcaaccugagcgacgcccacaagaagaaccucuacgaccacgcccugauguccaucaucagcaccuuccaccuguccauccccaacuucaaccaguacgaggccaugagcugcgacuucaacgggggcaagaucuccgugcaguacaaccucagccacgcguacgccguggacgccgccaaccacugcgggaccaucgcgaacggcguccugcagaccuucaugcggauggccuggggcggguccuacaucgcccuggacagcggcaagggguccugggacugcaucaugacgagcuaccaguaccucaucauccagaacaccaccugggaggaccacugccaguucucccgccccagccccaucggcuaccuggggcugcucagccagcggacccgcgacaucuacaucucccggcgccugcugggcacguucaccuggacccucagcgacuccgagggcaacgagacccccgggggcuacugccugacgcgguggaugcugaucgaggccgagcucaagugcuucgggaacaccgccguggcgaagugcaacgagaagcacgacgaggaguucugcgacaugcugcgccuguucgacuucaacaagcaggccauccggcgccucaaggccgaggcccagaugagcauccagcugaucaacaaggccgugaacgcgcugaucaacgaccagcucaucaugaagaaccaccuccgggacaucaugggcauccccuacugcaacuacuccaaguacugguaccugaaccacaccgucaccgggaagacgagccugccccgcugcuggcugguguccaacggcagcuaccugaacgagacccacuucuccgacgacaucgagcagcaggccgacaacaugaucaccgagcuccugcagaaggaguacaucgaccggcagggcaagaccccgcuggggcugguggaccucuucgucuucagcacguccuucuaccugaucagcaucuuccugcaccucgugaagaucccgugaggacuaguuauaagacugacuagcccgaugggccucccaacgggcccuccuccccuccuugcaccgagauuaauaaaaaaaaaaaaaaaaaaaaaaaaaaaaaaaaaaaaaaaaaaaaaaaaaaaaaaaaaaaaaaaaaaaaaaaaaaaaaaaaaaaaaaaaaaaaaaaaaaaa

SEQ ID NO: 43221 - RNA, 1548 nt, Artificial Sequence
  mRNA product Design i-3 (A100) comprising derived and/or modified sequence from LASV(LASV1000-NIG-2009;Clade II)__AIT17782__GPCmut13 (opt1)
aggagaaagcuuaccaugggccagaucaucaccuucuuccaggaggugccccacgucaucgaggaggugaugaacaucgugcugaucgcccucagccugcuggccauccucaaggggaucuacaacgucgcgaccugcggccuguucgggcugguguccuuccuccugcugugcggccgcagcugcuccacgaccuacaaggggguguacgagcuccagacccuggagcuggacauggccagccucaacaugaccaugccgcuguccugcacgaagaacaacagccaccacuacaucauggucggcaacgagaccggccuggagcucacccugaccaacacguccaucaucaaccacaaguucugcaaccugagcgacgcccacaagaagaaccucuacgaccacgcccugauguccaucaucagcaccuuccaccuguccauccccaacuucaaccaguacgaggccaugagcugcgacuucaacgggggcaagaucuccgugcaguacaaccucagccacaccuacgcgguggacgccgccaaccacugcgggaccaucgccaacggcguccugcagacguucaugcggauggcguggggcggguccuacaucgcccuggacagcggcaagggguccugggacugcaucaugaccagcuaccaguaccucaucauccagaacaccaccugggaggaccacugccaguucucccgccccagccccaucggcuaccuggggcugcucagccagcggacgcgcgacaucuacaucucccggcgccugcugggcaccuucaccuggacccucagcgacuccgagggcaacgagacgcccgggggcuacugccugacccgguggaugcugaucgaggccgagcucaagugcuucgggaacaccgccguggccaagugcaacgagaagcacgacgaggaguucugcgacaugcugcgccuguucgacuucaacaagcaggcgaucaagcggcucaagaccgaggcccagaugagcauccagcugaucaacaaggccgugaacgcccugaucaacgaccagcucaucaugaagaaccaccuccgcgacaucaugggcauccccuacugcaacuacuccaaguacugguaccugaaccacacggucaccgggaagaccagccugccccggugcuggcugguguccaacggcagcuaccugaacgagacccacuucuccgacgacaucgagcagcaggccgacaacaugaucacggagcuccugcagaaggaguacaucgaccgccagggcaagaccccgcuggggcugguggaccucuucgucuucagcaccuccuucuaccugaucagcaucuuccugcaccucgugaagaucccgugaggacuaguuauaagacugacuagcccgaugggccucccaacgggcccuccuccccuccuugcaccgagauuaauaaaaaaaaaaaaaaaaaaaaaaaaaaaaaaaaaaaaaaaaaaaaaaaaaaaaaaaaaaaaaaaaaaaaaaaaaaaaaaaaaaaaaaaaaaaaaaaaaaaa

SEQ ID NO: 43222 - RNA, 1548 nt, Artificial Sequence
  mRNA product Design i-3 (A100) comprising derived and/or modified sequence from LASV(LASV221-NIG-2010;Clade II)__AIT17624__GPCmut13 (opt1)
aggagaaagcuuaccaugggccagaucaucaccuucuuccaggaggugccccacgucaucgaggaggugaugaacaucgugcugaucgcccucagccugcuggccauccucaaggggaucuacaacgucgcgaccugcggccuguucgggcugguguccuuccuccugcugugcggccgcagcugcuccacgaccuacaaggggguguacgagcuccagacccuggagcuggacauggccagccucaacaugaccaugccgcuguccugcacgaagaacaacagccaccacuacaucauggucggcaacgagaccggccuggagcucacccugaccaacacguccaucaucaaccacaaguucugcaaccugagcgacgcccacaagaagaaccucuacgaccacgcccugauguccaucaucagcaccuuccaccuguccauccccaacuucaaccaguacgaggccaugagcugcgacuucaacgggggcaagaucuccgugcaguacaaccucagccacaccuacgcgaucgacgccgccaaccacugcgggaccaucgccaacggcgugcugcagacguucaugcggauggcguggggcggguccuacaucgcccuggacagcggcaagggguccugggacugcaucaugaccagcuaccaguaccucaucauccagaacaccaccugggaggaccacugccaguucucccgccccagccccaucggcuaccuggggcugcucagccagcggacgcgcgacaucuacaucucccggcgccugcugggcaccuucaccuggacccucagcgacuccgagggcaacgagacgcccgggggcuacugccugacccgguggaugcugaucgaggccgagcucaagugcuucgggaacaccgccgucgccaagugcaacgagaagcacgacgaggaguucugcgacaugcugcgccuguucgacuucaacaagcaggcgauccggcgccucaagaccgaggcccagaugagcauccagcugaucaacaaggccgugaacgcccugaucaacgaccagcucaucaugaagaaccaccuccgggacaucaugggcauccccuacugcaacuacuccaaguacugguaccugaaccacacggugaccgggaagaccagccugccccgcugcuggcuggucuccaacggcagcuaccugaacgagacccacuucuccgacgacaucgagcagcaggccgacaacaugaucacggagaugcuccagaaggaguacauggaccggcagggcaagaccccgcuggggcugguggaccuguucguguucagcaccuccuucuaccucaucagcaucuuccugcaccuggucaagaucccgugaggacuaguuauaagacugacuagcccgaugggccucccaacgggcccuccuccccuccuugcaccgagauuaauaaaaaaaaaaaaaaaaaaaaaaaaaaaaaaaaaaaaaaaaaaaaaaaaaaaaaaaaaaaaaaaaaaaaaaaaaaaaaaaaaaaaaaaaaaaaaaaaaaaa

SEQ ID NO: 43223 - RNA, 1548 nt, Artificial Sequence
  mRNA product Design i-3 (A100) comprising derived and/or modified sequence from LASV(LASV237-NIG-2010;Clade II)__AIT17638__GPCmut13 (opt1)
aggagaaagcuuaccaugggccagaucaucaccuucuuccaggaggugccccacgucaucgaggaggugaugaacaucgugcugaucgcccucagccugcuggccauccucaaggggaucuacaacgucgcgaccugcggccuguucgggcugguguccuuccuccugcugugcggccgcagcugcuccacgaccuacaaggggguguacgagcuccagacccuggagcuggacauggccagccucaacaugaccaugccgcuguccugcacgaagaacaacagccaccacuacaucauggucggcaacgagaccggccuggagcucacccugaccaacacguccaucaucaaccacaaguucugcaaccugagcgacgcccacaagaaggaccucuacgaccacgcccugauguccaucaucagcaccuuccaccuguccauccccaacuucaaccaguacgaggccaugagcugcgacuucaacgggggcaagaucuccgugcaguacaaccucagccacaccuacgcgguggacgccgccaaccacugcgggaccaucgccaacggcguccugcagacguucaugcggauggcguggggcggguccuacaucgcccuggacagcggcaagggguccugggacugcaucaugaccagcuaccaguaccucaucauccagaacaccaccugggaggaccacugccaguucucccgccccagccccaucggcuaccuggggcugcucagccagcggacgcgcgacaucuacaucucccggcgccugcugggcaccuucaccuggacccucagcgacuccgagggcaacgagacgcccgggggcuacugccugacccgguggaugcugaucgaggccgagcucaagugcuucgggaacaccgccguggccaagugcaacgagaagcacgacgaggaguucugcgacaugcugcgccuguucgacuucaacaagcaggcgauccggcgccucaagaccgaggcccagaugagcauccagcugaucaacaaggccgugaacgcccugaucaacgaccagcucaucaugaagaaccaccuccgggacaucaugggcauccccuacugcaacuacuccaaguacugguaccugaaccacacggucaccgggaagaccagccugccccgcugcuggcugguguccaacggcagcuaccugaacgagacccacuucuccgacgacaucgagcagcaggccgacaacaugaucacggagcuccugcagaaggaguacauggaccggcagggcaagaccccgcuggggcugguggaccucuucgucuucagcaccuccuucuaccugaucagcaucuuccugcaccucaucaagaucccgugaggacuaguuauaagacugacuagcccgaugggccucccaacgggcccuccuccccuccuugcaccgagauuaauaaaaaaaaaaaaaaaaaaaaaaaaaaaaaaaaaaaaaaaaaaaaaaaaaaaaaaaaaaaaaaaaaaaaaaaaaaaaaaaaaaaaaaaaaaaaaaaaaaaa

SEQ ID NO: 43224 - RNA, 1548 nt, Artificial Sequence
  mRNA product Design i-3 (A100) comprising derived and/or modified sequence from LASV(LASV253-NIG-2011;Clade II)__AIT17670__GPCmut13 (opt1)
aggagaaagcuuaccaugggccagaucaucaccuucuuccaggaggugccccacgucaucgaggaggugaugaacaucgugcugaucgcccucagccugcuggccauccucaaggggaucuacaacgucgcgaccugcggccuguucgggcugguguccuuccuccugcugugcggccgcagcugcuccacgaccuacaaggggguguacgagcuccagacccuggagcuggacauggccagccucaacaugaccaugccgcuguccugcacgaagaacaacagccaccacuacaucauggucggcaacgagaccggccuggagcucacccugaccaacacguccaucaucaaccacaaguucugcaaccugagcgacgcccacaagaagaaccucuacgaccacgcccugauguccaucaucagcaccuuccaccuguccauccccaacuucaaccaguacgaggccaugagcugcgacuucaacgggggcaagaucuccgugcaguacaaccucagccacaccuacgcgguggacgccgccaaccacugcgggaccaucgccaacggcguccugcagacguucaugcggauggcguggggcggguccuacaucgcccuggacagcggcaagggguccugggacugcaucaugaccagcuaccaguaccucaucauccagaacaccaccugggaggaccacugccaguucucccgccccagccccaucggcuaccuggggcugcucagccagcggacgcgcgacaucuacaucucccggcgccugcugggcaccuucaccuggacccucagcgacuccgagggcaacgagacgcccgggggcuacugccugacccgguggaugcugaucgaggccgagcucaagugcuucgggaacaccgccguggccaagugcaacgagaagcacgacgaggaguucugcgacaugcugcgccuguucgacuucaacaagcaggcgauccggcgccucaaggccgaggcccagaugagcauccagcugaucaacaaggccgugaacgcccugaucaacgaccagcucaucaugaagaaccaccuccgggacaucaugggcaucccguacugcaacuacuccaaguacugguaccugaaccacaccgucacggggcgcaccagccugccccggugcuggcugguguccaacggcagcuaccugaacgagacccacuucuccgacgacaucgagcagcaggcggacaacaugaucaccgagcuccugcagaaggaguacaucgaccgccagggcaagacgccccuggggcugguggaccucuucgucuucagcaccuccuucuaccugaucagcaucuuccugcaccucgugaagaucccgugaggacuaguuauaagacugacuagcccgaugggccucccaacgggcccuccuccccuccuugcaccgagauuaauaaaaaaaaaaaaaaaaaaaaaaaaaaaaaaaaaaaaaaaaaaaaaaaaaaaaaaaaaaaaaaaaaaaaaaaaaaaaaaaaaaaaaaaaaaaaaaaaaaaa

SEQ ID NO: 43225 - RNA, 1548 nt, Artificial Sequence
  mRNA product Design i-3 (A100) comprising derived and/or modified sequence from LASV(LASV254-NIG-2011;Clade II)__AIT17674__GPCmut13 (opt1)
aggagaaagcuuaccaugggccagaucaucaccuucuuccaggaggugccccacgucaucgaggaggugaugaacaucgugcugaucgcccucagccugcuggccauccucaaggggaucuacaacgucgcgaccugcggccuguucgggcugguguccuuccuccugcugugcggccgcagcugcuccacgaccuacaaggggguguacgagcuccagacccuggagcuggacaugaccaaccucaacaugacgaugccgcugagcugcaccaagaacaacucccaccacuacaucauggucggcaacgagaccggccuggagcucacccugacgaacaccagcaucaucaaccacaaguucugcaaccuguccgacgcccacaagaagaaccucuacaaccacgcccugaugagcaucaucuccaccuuccaccugagcauccccaacuucaaccaguacgaggccauguccugcgacuucaacgggggcaagaucagcgugcaguacaaccucucccacagcuacgccguggacgcggccaaccacugcgggaccaucgccaacggcguccugcagacguucaugcggauggccuggggcggguccuacaucgcgcuggacagcggcaaggggaacugggacugcaucaugaccuccuaccaguaccucaucauccagaacaccaccugggaggaccacugccaguucagccgccccucccccaucggcuaccuggggcugcucagccagcggacgcgcgacaucuacaucagccggcgccugcugggcaccuucaccuggacccucuccgacagcgagggcaacgagacgcccgggggcuacugccugacccgguggaugcugaucgaggccgagcucaagugcuucgggaacaccgccguggccaagugcaacgagaagcacgacgaggaguucugcgacaugcugcgccuguucgacuucaacaagcaggccauccggcgccucaagaccgaggcgcaggccaacauccagcugaucaacaaggccgugaacgcccugaucaacgaccagcucaucaugaagaaccaccuccgggacaucaugggcauccccuacugcaacuacuccaaguacugguaccugaaccacacggucaccgggaagaccagccugccccgcugcuggcugguguccaacggcagcuaccugaacgagacccacuucuccgacgacaucgagcagcaggccgacaacaugaucacggagcuccugcagaaggaguacauggaccggcagggcaagaccccgcuggggcugguggaccucuucgucuucagcaccuccuucuaccugaucagcaucuuccugcaccucgugaagaucccgugaggacuaguuauaagacugacuagcccgaugggccucccaacgggcccuccuccccuccuugcaccgagauuaauaaaaaaaaaaaaaaaaaaaaaaaaaaaaaaaaaaaaaaaaaaaaaaaaaaaaaaaaaaaaaaaaaaaaaaaaaaaaaaaaaaaaaaaaaaaaaaaaaaaa

SEQ ID NO: 43226 - RNA, 1548 nt, Artificial Sequence
  mRNA product Design i-3 (A100) comprising derived and/or modified sequence from LASV(Nig08-A19;Clade III)__ADU56618__GPCmut13 (opt1)
aggagaaagcuuaccaugggccagaucgugaccuucuuccaggaggucccccacgugaucgaggaggugaugaacaucguccugaucgcccucagcauccuggccauccugaaggggcucuacaacaucgcgaccugcggccugaucgggcuggugacguuccuccugcuguccggccgcagcugcuccaugaccuacaaggggguguacgagcuccagacccuggagcugaacaugaacacccucaacaugacgaugccgcugagcugcaccaagaacaacucccaccacuacaucauggucggcaacgagaccggccuggagcucacccugacgaacaccagccugcuccaccacaaguucugcaaccuguccgacgcccacaagaagaaccuguacgaccacacccucaugagcaucaucuccaccuuccaccugagcauccccaacuucaaccaguacgaggccauguccugcgacuucaacgggggcaagaucacggugcaguacaaccugagccacuccuacgccaucgacgccgcgaaccacugcgggaccguggccaacggcguccuccagaccuucaugcggauggccuggggcgggagcuacaucgcccuggacuccggccgcgggaagugggacugcaucaugaccagcuaccaguaccugaucauccagaacacgaccugggaggaccacugccaguucucccggcccagccccaucggcuaccucgggcugcugucccagcgcacccgggacaucuacaucagccgccggcuccugggcaccuucacguggacccugagcgacuccgagggcaacgagacccccgggggcuacugccucacccgcuggaugcugaucgaggcggagcugaagugcuucgggaacacggccguggccaagugcaacgagaagcacgacgaggaguucugcgacaugcuccggcuguucgacuucaacaagcaggccauccgccggcugaaggccgaggcgcagaugagcauccagcucaucaacaaggccgugaacgcccugaucaacgaccagcugaucaugaagaaccaccuccgcgacaucaugggcauccccuacugcaacuacuccaaguacugguaccugaaccacaccagcaccgggcggaccucccugccccgcugcuggcucgucagcaacggcuccuaccugaacgagacgcacuucagcgacgacaucgagcagcaggccgacaacaugaucaccgagaugcugcagaaggaguaccuggaccggcagggcaagaccccgcucgggcugguggaccuguucguguucuccaccagcuucuaccucaucuccaucuuccugcaccuggucaagaucccgugaggacuaguuauaagacugacuagcccgaugggccucccaacgggcccuccuccccuccuugcaccgagauuaauaaaaaaaaaaaaaaaaaaaaaaaaaaaaaaaaaaaaaaaaaaaaaaaaaaaaaaaaaaaaaaaaaaaaaaaaaaaaaaaaaaaaaaaaaaaaaaaaaaaa

SEQ ID NO: 43227 - RNA, 1551 nt, Artificial Sequence
  mRNA product Design i-3 (A100) comprising derived and/or modified sequence from LASV(G1180-SLE-2010;Clade IV)__AIT17168__GPCmut13 (opt1)
aggagaaagcuuaccaugggccagaucgugaccuucuuccaggaggucccccacgugaucgaggaggugaugaacaucguccugaucgcccucagcauccuggccgugcugaaggggcucuacaacuucgcgaccugcggccugguggggcugcucaccuuccugcugcucugcggccgcuccugcaccgccagccgguacaagggggucuacgagcugcagacccuggagcucaacauggagacccugaacaugacgaugccgcuguccugcaccaagaacaacagccaccacuacaucauggugggcaacgagaccggccucgagcugacccugacgaacaccuccaucaucaaccacaaguucugcaaccucagcgacgcccacaagaagaaccuguacgaccacgcccugauguccaucaucagcaccuuccaccucuccauccccaacuucaaccaguacgaggccaugagcugcgacuucaacgggggcaagaucuccgugcaguacaaccugagccacuccuacgcgggggacgccgccaaccacugcggcaccgucgccaacggggugcugcagacguucaugcgcauggcguggggcggcagcuacaucgcccucgacuccgggcacggcagcugggacugcaucaugaccuccuaccaguaccugaucauccagaacaccaccugggaggaccacugccaguucagccggcccucccccaucggguaccugggccuccugagccagcgcacgcgggacaucuacaucagccgccggcugcucggcaccuucaccuggacccuguccgacagcgaggggaaggacacgccgggcggguacugccugacccgcuggaugcucaucgaggccgagcugaagugcuucggcaacaccgccguggccaagugcaacgagaagcacgacgaggaguucugcgacaugcugcggcuguucgacuucaacaagcaggcgauccagcgccugaaggccgaggcccagauguccauccagcugaucaacaaggccgucaacgcccucaucaacgaccagcugaucaugaagaaccaccuccgggacaucauggggauccccuacugcaacuacagcaaguacugguaccucaaccacaccacgaccggcaagaccucccugcccaagugcuggcuggugagcaacggcuccuaccucaacgagacccacuucagcgacgacaucgagcagcaggcggacaacaugaucacggagaugcugcagaaggaguacauggagcgccaggggaagacgccccugggccugguggaccucuucgucuucuccaccagcuucuaccugaucuccaucuuccugcaccucgugaagaucccgugaggacuaguuauaagacugacuagcccgaugggccucccaacgggcccuccuccccuccuugcaccgagauuaauaaaaaaaaaaaaaaaaaaaaaaaaaaaaaaaaaaaaaaaaaaaaaaaaaaaaaaaaaaaaaaaaaaaaaaaaaaaaaaaaaaaaaaaaaaaaaaaaaaaa

SEQ ID NO: 43228 - RNA, 1551 nt, Artificial Sequence
  mRNA product Design i-3 (A100) comprising derived and/or modified sequence from LASV(G1442-SLE-2011;Clade IV)__AIT17180__GPCmut13 (opt1)
aggagaaagcuuaccaugggccagaucgugaccuucuuccaggaggucccccacgugaucgaggaggugaugaacaucguccugaucgcccucagcauccuggccgugcugaaggggcucuacaacguggcgaccugcggccugaucgggcuggucacguuccuccugcugugcggccgcuccugcaccaccacccucuacaaggggguguacgagcugcagacgcuggagcucaacauggagacccugaacaugaccaugccgcugagcugcaccaagaacaacucccaccacuacauccgggugggcaacgagacgggccucgagcugacccugaccaacaccagcaucaucaaccacaaguucugcaaccucuccgacgcccacaagaagaaccuguacgaccacgcccugaugagcaucaucuccacguuccaccucagcauccccaacuucaaccaguacgaggccauguccugcgacuucaacgggggcaagaucagcguccaguacaaccugucccacagcuacgccggggacgcggccaaccacugcggcaccguggccaacggggugcugcagaccuucaugcgcauggccuggggcggcuccuacaucgcgcucgacagcgggcggggcaacugggacugcaucaugaccuccuaccaguaccugaucauccagaacacgaccugggacgaccacugccaguucagccgccccucccccaucggguaccugggccuccugagccagcggacccgcgacgucuacaucucccggcgccugcucggcaccuucacguggacccugagcgacagcgaggggaaggacaccccgggcggguacugccugacccgguggaugcucaucgaggccgagcugaagugcuucggcaacacggccguggccaagugcaacgagaagcacgacgaggaguucugcgacaugcugcgccucuucgacuucaacaagcaggccauccagcggcugaaggcggaggcccagauguccauccagcugaucaacaaggccgugaacgcccucaucaacgaccagcugaucaugaagaaccaccuccgcgacaucauggggauccccuacugcaacuacagcaaguacugguaccugaacaacaccgccaccggcaagaccucccugcccaagugcuggcugaucagcaacggcuccuaccucaacgagacgcacuucagcgacgacaucgagcaggaggcggacaacaugaucaccgagaugcugcagaaggaguacauggagcggcaggggaagacgccccugggccuggucgaccucuucguguucuccaccagcuucuaccugaucuccaucuuccugcaccucgugaagaucccgugaggacuaguuauaagacugacuagcccgaugggccucccaacgggcccuccuccccuccuugcaccgagauuaauaaaaaaaaaaaaaaaaaaaaaaaaaaaaaaaaaaaaaaaaaaaaaaaaaaaaaaaaaaaaaaaaaaaaaaaaaaaaaaaaaaaaaaaaaaaaaaaaaaaa

SEQ ID NO: 43229 - RNA, 1551 nt, Artificial Sequence
  mRNA product Design i-3 (A100) comprising derived and/or modified sequence from LASV(G3010-SLE-2013;Clade IV)__AIT17344__GPCmut13 (opt1)
aggagaaagcuuaccaugggccagaucgugaccuucuuccaggaggucccccacgugaucgaggaggugaugaacaucguccugaucgcccucagcauccuggccgugcugaaggggcucuacaacuucgcgaccugcggccugguggggcuggucacguuccuccugcugugcggccgcuccugcaccaccagccucuacaaggggguguacgagcugcagacccuggagcucaacauggagacgcugaacaugaccaugccgcuguccugcaccaagaacaacagccaccacuacaucauggugggcaacgagaccggccucgagcugacgcugaccaacaccuccaucaucaaccacaaguucugcaaccucagcgacgcccacaagaagaaccuguacaaccacgcccugauguccaucaucagcaccuuccaccucuccauccccaacuucaaccaguacgaggccaugagcugcgacuucaacgggggcaagaucuccguccaguacaaccugagccacuccuacgccggggacgcggccagccacugcggcacgguggccaacggggugcugcagaccuucaugcggauggccuggggcggcuccuacaucgcgcucgacagcggguacggcaagugggacugcaucaugaccuccuaccaguaccugaucauccagaacaccacgugggaggaccacugccaguucagccgccccucccccaucggguaccugggccuccugagccagcggacccgcgacaucuacaucagccggcgccugcucggcaccuucaccuggacgcuguccgacagcgaggggaaggacaccccgggcggguacugccugacccgguggaugcucaucgaggccgagcugaagugcuucggcaacaccgccgucgccaagugcaacgagaagcacgacgaggaguucugcgacaugcugcgccucuucgacuucaacaagcaggccauccagcggcugaagacggaggcgcagauguccauccagcugaucaacaaggccgugaacgcccucaucaacgaccagcugaucaugaagaaccaccuccgcgacaucauggggauccccuacugcaacuacagcaaguacugguaccugaaccacaccaccaccggcaagacgucccugcccaagugcuggcuggugagcaacggcuccuaccucaacgagacccacuucagcgacgacaucgagcagcaggccgacaacaugaucaccgagaugcugcagaaggaguacauggagcggcaggggaagacgccccugggccuggucgaccucuucguguucuccaccagcuucuaccugaucuccaucuuccugcaccucgugaagaucccgugaggacuaguuauaagacugacuagcccgaugggccucccaacgggcccuccuccccuccuugcaccgagauuaauaaaaaaaaaaaaaaaaaaaaaaaaaaaaaaaaaaaaaaaaaaaaaaaaaaaaaaaaaaaaaaaaaaaaaaaaaaaaaaaaaaaaaaaaaaaaaaaaaaaa

SEQ ID NO: 43230 - RNA, 1551 nt, Artificial Sequence
  mRNA product Design i-3 (A100) comprising derived and/or modified sequence from LASV(G502-SLE-2009;Clade IV)__AIT17126__GPCmut13 (opt1)
aggagaaagcuuaccaugggccagaucgugaccuucuuccaggaggucccccacgugaucgaggaggugaugaacaucguccugaucgcccucagcauccuggccgugcugaaggggcucuacaacuucgcgaccugcggccugguggggcugcucacguuccugcugcucugcggccgcuccugcaccaccgggcuguacaagggcgucuacgagcugcagacccucgagcugaacauggagacgcugaacaugaccaugccgcucagcugcaccaagaacaacucccaccacuacaucauggugggcaacgagaccgggcuggagcugacgcucaccaacaccagcaucaucaaccacaaguucugcaaccuguccgacgcccacaagaagaaccuguacgaccacgcccucaugagcaucaucuccaccuuccaccugagcauccccaacuucaaccaguacgaggccauguccugcgacuucaacggcgggaagaucagcgugcaguacaaccugucccacagcuacgccggcgacgcggccgaccacugcgggacggucgccaacggcgugcuccagaccuucaugcggauggccuggggcggguccuacaucgcgcuggacagcggccgcgggcggugggacugcaucaugaccuccuaccaguaccugaucauccagaacaccacgugggaggaccacugccaguucagccgccccucccccaucggcuaccucggccugcugagccagcggacccgcgacaucuacaucucccggcgccuccuggggaccuucaccuggacgcugagcgacagcgagggcaaggacacccccgggggcuacugccucacccgguggaugcugaucgaggccgagcugaagugcuucgggaacaccgccguggccaagugcaacgagaagcacgacgaggaguucugcgacaugcuccgccuguucgacuucaacaagcaggccauccagcggcugaaggcggaggcccagauguccauccagcucaucaacaaggccgucaacgcccugaucaacgaccagcuggugaugaagaaccaccuccgcgacaucaugggcauccccuacugcaacuacagccgguacugguaccugaaccacacgaccaccggccgcaccucccugcccaagugcuggcucgugagcaacggguccuaccugaacgagacgcacuucagcgacgacaucgagcagcaggccgacaacaugaucaccgagaugcugcagaaggaguacauggagcggcagggcaagaccccgcuggggcucgucgaccuguucguguucuccaccagcuucuaccugaucuccaucuuccuccaccuggugaagaucccgugaggacuaguuauaagacugacuagcccgaugggccucccaacgggcccuccuccccuccuugcaccgagauuaauaaaaaaaaaaaaaaaaaaaaaaaaaaaaaaaaaaaaaaaaaaaaaaaaaaaaaaaaaaaaaaaaaaaaaaaaaaaaaaaaaaaaaaaaaaaaaaaaaaaa

SEQ ID NO: 43231 - RNA, 1551 nt, Artificial Sequence
  mRNA product Design i-3 (A100) comprising derived and/or modified sequence from LASV(G733-SLE-2010;Clade IV)__AIT17154__GPCmut13 (opt1)
aggagaaagcuuaccaugggccagaucgugaccuucuuccaggaggucccccacgugaucgaggaggugaugaacaucguccugaucgcccucagcauccuggccgugcugaaggggcucuacaacuucgcgaccugcggcaucguggggcuggucuccuuccugcuccugugcggccgcagcugcacgaccucccuguacaaggggguguacgagcuccagacccuggagcugaacauggagacccucaacaugacgaugccgcugagcugcaccaagaacaacucccaccacuacaucauggugggcaacgagaccggccuggagcucacccugacgaacaccagcaucaucaaccacaaguucugcaaccuguccgacgcccacaagaagaaccucuacgaccacgcccugaugagcaucaucuccaccuuccaccugagcauccccaacuucaaccaguacgaggccauguccugcgacuucaacgggggcaagaucagcguccaguacaaccucucccacagcuacgccggggacgcggccaaccacugcggcaccaucgccaacggggugcugcagacguucaugcggauggccuggggcggcuccuacaucgcgcuggacagcgggcgcgaccggugggacugcaucaugaccuccuaccaguaccucaucauccagaacaccaccugggaggaccacugccaguucagccgccccucccccaucggcuaccuggggcugcucagccagcggacgcgcgacaucuacaucagccggcgccugcugggcaccuucaccuggacccucuccgacagcgagggcaaggacacgcccgggggcuacugccugacccgguggaugcugaucgaggccgagcucaagugcuucgggaacaccgccguggccaagugcaacgagaagcacgacgaggaguucugcgacaugcugcgccuguucgacuucaacaagcaggccauccagcggcucaaggcggaggcccagauguccauccagcugaucaacaaggccgucaacgcccugaucaacgaccagcucaucaugaagaaccaccuccgcgacaucaugggcauccccuacugcaacuacagcaaguacugguaccugaaccacaccacgaccgggaagaccucccugcccaagugcuggcuggugagcaacggcuccuaccugaacgagacccacuucagcgacgacaucgagcagcaggccgacaacaugaucacggagaugcuccagaaggaguacauggagcggcagggcaagaccccgcuggggcugguggaccuguucgucuucuccaccagcuucuaccucaucuccaucuuccugcaccuggugaagaucccgugaggacuaguuauaagacugacuagcccgaugggccucccaacgggcccuccuccccuccuugcaccgagauuaauaaaaaaaaaaaaaaaaaaaaaaaaaaaaaaaaaaaaaaaaaaaaaaaaaaaaaaaaaaaaaaaaaaaaaaaaaaaaaaaaaaaaaaaaaaaaaaaaaaaa

SEQ ID NO: 43232 - RNA, 1551 nt, Artificial Sequence
  mRNA product Design i-3 (A100) comprising derived and/or modified sequence from MOPV/LASV reassortant(IGS-1;Clade IV)__AFY05576__GPCmut13 (opt1)
aggagaaagcuuaccaugggccagaucgugaccuucuuccaggaggucccccacgugaucgaggaggugaugaacaucguccugaucgcccucagcgugcuggccgugcugaaggggcucuacaacuucgcgaccugcggccuggucgggcuggugacguuccuccugcugugcggccgcuccugcaccaccagccucuacaaggggguguacgagcugcagacccuggagcucaacauggagacgcugaacaugaccaugccgcuguccugcaccaagaacaacagccaccacuacaucauggucggcaacgagaccggccucgagcugacgcugaccaacaccuccaucaucaaccacaaguucugcaaccucagcgacgcccacaagaagaaccuguacgaccacgcccugauguccaucaucagcaccuuccaccucuccauccccaacuucaaccaguacgaggccaugagcugcgacuucaacgggggcaagaucuccgugcaguacaaccugagccacuccuacgccggggacgcggccaaccacugcggcacgguggccaacgggguccugcagaccuucaugcggauggccuggggcggcagcuacaucgcgcucgacuccgggcgcggcaacugggacugcaucaugaccagcuaccaguaccugaucauccagaacaccacgugggaggaccacugccaguucucccggcccagccccaucggguaccugggccuccugucccagcgcacccgggacaucuacaucagccgccggcugcucggcaccuucaccuggacgcugagcgacuccgagggggaggacaccccgggcggguacugccugacccgcuggaugcucaucgaggccgagcugaagugcuucggcaacaccgccguggccaagugcaacgagaagcacgacgaggaguucugcgacaugcugcggcuguucgacuucaacaagcaggccauccagcgccugaaggcggaggcccagaugagcauccagcugaucaacaaggccgugaacgcccucaucaacgaccagcugaucaugaagaaccaccuccgggacaucauggggauccccuacugcaacuacuccaaguacugguaccucaaccacacgaccaccggccgcaccagccugcccaagugcuggcuggucuccaacggcagcuaccucaacgagacgcacuucuccgacgacaucgagcagcaggccgacaacaugaucaccgagaugcugcagaaggaguacauggagcggcaggggaagacgccccugggccugguggaccucuucguguucagcaccuccuucuaccugaucagcaucuuccugcaccucgucaagaucccgugaggacuaguuauaagacugacuagcccgaugggccucccaacgggcccuccuccccuccuugcaccgagauuaauaaaaaaaaaaaaaaaaaaaaaaaaaaaaaaaaaaaaaaaaaaaaaaaaaaaaaaaaaaaaaaaaaaaaaaaaaaaaaaaaaaaaaaaaaaaaaaaaaaaa

SEQ ID NO: 43233 - RNA, 1551 nt, Artificial Sequence
  mRNA product Design i-3 (A100) comprising derived and/or modified sequence from LASV(LM765-SLE-2012;Clade IV)__AIT17814__GPCmut13 (opt1)
aggagaaagcuuaccaugggccagaucgugaccuucuuccaggaggucccccacgugaucgaggaggugaugaacaucguccugaucgcccucagcauccuggccgugcugaaggggcucuacaacuucgcgaccugcggccugguggggcuggucacguuccuccugcugugcggccgcuccugcaccaccagccucuacaaggggguguacgagcugcagacccuggagcucaacauggagacgcugaacaugaccaugccgcuguccugcaccaagaacaacagccaccacuacaucauggugggcaacgagaccggccucgagcugacgcugaccaacaccuccaucaucgaccacaaguucugcaaccucagcgacgcccaccggaagaaccuguacgaccacgcccugauguccaucaucagcaccuuccaccucuccauccccaacuucaaccaguacgaggccaugagcugcgacuucaacgggggcaagaucuccguccaguacaaccugagccacuccuacgccaaggacgcggccgaccacugcgggacgguggccaacggcgugcugcagaccuucaugcgcauggccuggggcgggagcuacaucgcgcucgacuccggccgggggcgcugggacugcaucaugaccagcuaccaguaccugaucauccagaacaccacgugggaggaccacugccaguucucccggcccagccccaucggcuaccuggggcuccugucccagcgcacccgggacaucuacaucagccgccggcugcucggcaccuucaccuggacgcugagcgacuccgagggcaaggacacccccgggggcuacugccugacccgcuggaugcucaucgaggccgagcugaagugcuucgggaacaccgccgucgccaagugcaacgagaagcacgacgaggaguucugcgacaugcugcggcuguucgacuucaacaagcaggccauccagcgccugaaggcggaggcccagaugagcauccagcugaucaacaaggccgugaacgcccucaucaacgaccagcugaucaugaagaaccaccuccgggacaucaugggcauccccuacugcaacuacuccaaguacugguaccucaaccacacgaccaccgggaagaccagccugcccaagugcuggcugguguccaacggcagcuaccucaacgagacgcacuucuccgacgacaucgagcagcaggccgacaacaugaucaccgagaugcugcagaaggaguacauggagcgccagggcaagaccccgcuggggcuggucgaccucuucguguucagcaccuccuucuaccugaucagcaucuuccugcaccucgugaagaucccgugaggacuaguuauaagacugacuagcccgaugggccucccaacgggcccuccuccccuccuugcaccgagauuaauaaaaaaaaaaaaaaaaaaaaaaaaaaaaaaaaaaaaaaaaaaaaaaaaaaaaaaaaaaaaaaaaaaaaaaaaaaaaaaaaaaaaaaaaaaaaaaaaaaaa

SEQ ID NO: 43234 - RNA, 1551 nt, Artificial Sequence
  mRNA product Design i-3 (A100) comprising derived and/or modified sequence from LASV(LM776-SLE-2012;Clade IV)__AIT17824__GPCmut13 (opt1)
aggagaaagcuuaccaugggccagaucgugaccuucuuccaggaggucccccacgugaucgaggaggugaugaacaucguccugaucgcccucagcauccuggccgugcugaaggggcucuacaacuucgcgaccugcggccugguggggcuggucacguuccuccugcugugcggccgcuccugcaccaccagcguguacaaggggguguacgagcuccagacccuggagcugaacauggagacgcucaacaugaccaugccgcuguccugcaccaagaacaacagccaccacuacaucauggucggcaacgagaccggccuggagcucacgcugaccaacaccuccaucaucaaccacaaguucugcaaccugagcgacgcccacaagaagaaccucuacgaccacgcccugauguccaucaucagcaccuuccaccuguccauccccaacuucaaccaguacgaggccaugagcugcgacuucaacgggggcaagaucuccgugcaguacaaccucagccacuccuacgccggggacgcggccaaccacugcggcacgguggccaacgggguccugcagaccuucaugcggauggccuggggcggcagcuacaucgcgcuggacuccgggcacggcaagugggacugcaucaugaccagcuaccaguaccucaucauccagaacaccacgugggaggaccacugccaguucucccgccccagccccaucggguaccugggccugcucucccagcggacccgcgacaucuacaucagccggcgccugcugggcaccuucaccuggacgcucagcgacuccgaggggaaggacaccccgggcggguacugccugacccgguggaugcugaucgaggccgagcucaagugcuucggcaacaccgccguggccaagugcaacgagaagcacgacgaggaguucugcgacaugcugcgccuguucgacuucaacaagcaggccauccagcggcucaaggcggaggcccagaugagcauccagcugaucaacaaggccgugaacgcccugaucaacgaccagcucaucaugaagaaccaccuccgcgacaucauggggauccccuacugcaacuacuccaaguacugguaccugaaccacacgaccaccggcaagaccagccugcccaagugcuggcuggucuccaacggcagcuaccugaacgagacgcacuucuccgacgacaucgagcagcaggccgacaacaugaucaccgagaugcuccagaaggaguacauggagcggcaggggaagacgccccugggccugguggaccuguucguguucagcaccuccuucuaccucaucagcaucuuccugcaccuggucaagaucccgugaggacuaguuauaagacugacuagcccgaugggccucccaacgggcccuccuccccuccuugcaccgagauuaauaaaaaaaaaaaaaaaaaaaaaaaaaaaaaaaaaaaaaaaaaaaaaaaaaaaaaaaaaaaaaaaaaaaaaaaaaaaaaaaaaaaaaaaaaaaaaaaaaaaa

SEQ ID NO: 43235 - RNA, 1551 nt, Artificial Sequence
  mRNA product Design i-3 (A100) comprising derived and/or modified sequence from LASV(Mad39;Clade IV)__ANH09722__GPCmut13 (opt1)
aggagaaagcuuaccaugggccagaucgugaccuucuuccaggaggucccccacgugaucgaggaggugaugaacaucguccugaucgcccucagcauccuggccgugcugaaggggcucuacaacguggcgaccugcggccugaucgggcuggucacguuccuccugcugugcggccgcuccugcaccaccacccucuacaaggggguguacgagcugcaggcccuggagcucaacauggagacgcugaacaugaccaugccgcugagcugcaccaagaacaacucccaccacuacauccgggugggcaacgagaccggccucgagcugacgcugaccaacaccagccucaucaaccacaaguucugcaaccuguccgacgcccacaagaagaaccuguacgaccacgcccucaugagcaucaucuccaccuuccaccugagcauccccaacuucaaccaguacgaggccauguccugcgacuucaacgacgggaagaucagcguccaguacaaccugucccacacguacgcgggcgacaccgccaaccacugcgggaccguggccaacggcgugcuccagaccuucaugcgcauggccuggggcgggagcuacaucgcgcuggacuccggccgcgggggcugggacugcaucaugacgagcuaccaguaccugaucauccagaacaccaccugggaggaccacugccaguucucccggcccagccccaucggguaccucggccugcugucccagcggacccgcgacaucuacaucagccggcgccuccugggcacguucaccuggacccuguccgacagcgaggggaaggacaccccgggcggguacugccucacgcgguggaugcugaucgaggccgagcugaagugcuucggcaacaccgccgucgccaagugcaacgagaagcacgacgaggaguucugcgacaugcuccgccuguucgacuucaacaagcaggccauccagcggcugaaggcggaggcccagaugagcauccagcucaucaacaaggccgugaacgcccugaucaacgaccagcugaucaugaagaaccaccuccgcgacaucauggggauccccuacugcaacuacuccaaguacugguaccugaaccacaccgugaccggcaagacgagccugcccaagugcuggcucgucuccaacggcagcuaccugaacgagacccacuucuccgacgacaucgagcagcaggccgacaacaugaucaccgagaugcugcagaaggaguacauggagcggcaggggaagacgccccugggccucguggaccuguucguguucagcaccuccuucuaccugaucagcaucuuccuccaccuggucaagaucccgugaggacuaguuauaagacugacuagcccgaugggccucccaacgggcccuccuccccuccuugcaccgagauuaauaaaaaaaaaaaaaaaaaaaaaaaaaaaaaaaaaaaaaaaaaaaaaaaaaaaaaaaaaaaaaaaaaaaaaaaaaaaaaaaaaaaaaaaaaaaaaaaaaaaa

SEQ ID NO: 43236 - RNA, 1551 nt, Artificial Sequence
  mRNA product Design i-3 (A100) comprising derived and/or modified sequence from LASV(Z0947-SLE-2011;Clade IV)__AIT17840__GPCmut13 (opt1)
aggagaaagcuuaccaugggccagaucgugaccuucuuccaggaggucccccacgugaucgaggaggugaugaacaucguccugaucgcccucagcauccuggccgugcugaaggggcucuacaacuucgcgaccugcggccugguggggcuggucacguuccuccugcugugcggccgcuccugcaccaucagccucuacaaggggguguacgagcugcagacccuggagcucaacauggagacccugaacaugacgaugccgcuguccugcaccaagaacaacagccaccacuacaucauggugggcaacgagaccggccucgagcugacccugacgaacaccuccaucaucaaccacaaguucugcaaccucagcgacgcccacaagaagaaccuguacgaccacgcccugauguccaucaucagcaccuuccaccucuccauccccaacuucaaccaguacgaggccaugagcugcgacuucaacgggggcaagaucuccguccaguacaaccugagccacuccuacgccggggacgcggccaaccacugcggcaccguggccaacggggugcugcagacguucaugcggauggccuggggcggcagcuacaucgcgcucgacuccgggcgcgaccggugggacugcaucaugaccagcuaccaguaccugaucauccagaacaccaccugggaggaccacugccaguucucccgccccagccccaucggcuaccuggggcuccugucccagcggacgcgcgacaucuacaucagccggcgccugcucggcaccuucaccuggacccugagcgacuccgagggcaaggacacgcccgggggcuacugccugacccgguggaugcucaucgaggccgagcugaagugcuucgggaacaccgccgucgccaagugcaacgagaagcacgacgaggaguucugcgacaugcugcgccucuucgacuucaacaagcaggccauccagcggcugaaggcggaggcccagaugagcauccagcugaucaacaaggccgugaacgcccucaucaacgaccagcugaucaugaagaaccaccuccgcgacaucaugggcauccccuacugcaacuacuccaaguacugguaccugaaccacaccacgaccgggaagaccagccugcccaagugcuggcugguguccaacggcagcuaccucaacgagacccacuucuccgacgacaucgagcagcaggccgacaacaugaucacggagaugcugcagaaggaguacauggagcggcagggcaagaccccgcuggggcuggucgaccucuucguguucagcaccuccuucuaccugaucagcaucuuccugcaccucgugaagaucccgugaggacuaguuauaagacugacuagcccgaugggccucccaacgggcccuccuccccuccuugcaccgagauuaauaaaaaaaaaaaaaaaaaaaaaaaaaaaaaaaaaaaaaaaaaaaaaaaaaaaaaaaaaaaaaaaaaaaaaaaaaaaaaaaaaaaaaaaaaaaaaaaaaaaa

SEQ ID NO: 43237 - RNA, 1551 nt, Artificial Sequence
  mRNA product Design i-3 (A100) comprising derived and/or modified sequence from LASV(Josiah;Clade IV)__NP_694870__GPCmut13 (opt4)
aggagaaagcuuaccaugggccagaucgugaccuucuuccaggaggugccccacgugaucgaggaggugaugaacaucgugcugaucgcccugagcgugcuggccgugcugaagggccuguacaacuucgccaccugcggccuggugggccuggugaccuuccugcugcugugcggcagaagcugcaccaccagccuguacaagggcguguacgagcugcagacccuggagcugaacauggagacccugaacaugaccaugccccugagcugcaccaagaacaacagccaccacuacaucauggugggcaacgagaccggccuggagcugacccugaccaacaccagcaucaucaaccacaaguucugcaaccugagcgacgcccacaagaagaaccuguacgaccacgcccugaugagcaucaucagcaccuuccaccugagcauccccaacuucaaccaguacgaggccaugagcugcgacuucaacggcggcaagaucagcgugcaguacaaccugagccacagcuacgccggcgacgccgccaaccacugcggcaccguggccaacggcgugcugcagaccuucaugagaauggccuggggcggcagcuacaucgcccuggacagcggcagaggcaacugggacugcaucaugaccagcuaccaguaccugaucauccagaacaccaccugggaggaccacugccaguucagcagacccagccccaucggcuaccugggccugcugagccagagaaccagagacaucuacaucagcagaagacugcugggcaccuucaccuggacccugagcgacagcgagggcaaggacacccccggcggcuacugccugaccagauggaugcugaucgaggccgagcugaagugcuucggcaacaccgccguggccaagugcaacgagaagcacgacgaggaguucugcgacaugcugagacuguucgacuucaacaagcaggccauccagagacugaaggccgaggcccagaugagcauccagcugaucaacaaggccgugaacgcccugaucaacgaccagcugaucaugaagaaccaccugagagacaucaugggcauccccuacugcaacuacagcaaguacugguaccugaaccacaccaccaccggcagaaccagccugcccaagugcuggcuggugagcaacggcagcuaccugaacgagacccacuucagcgacgacaucgagcagcaggccgacaacaugaucaccgagaugcugcagaaggaguacauggagagacagggcaagaccccccugggccugguggaccuguucguguucagcaccagcuucuaccugaucagcaucuuccugcaccuggugaagauccccugaggacuaguuauaagacugacuagcccgaugggccucccaacgggcccuccuccccuccuugcaccgagauuaauaaaaaaaaaaaaaaaaaaaaaaaaaaaaaaaaaaaaaaaaaaaaaaaaaaaaaaaaaaaaaaaaaaaaaaaaaaaaaaaaaaaaaaaaaaaaaaaaaaaa

SEQ ID NO: 43238 - RNA, 1548 nt, Artificial Sequence
  mRNA product Design i-3 (A100) comprising derived and/or modified sequence from LASV(LP;Clade I)__AAF86701__GPCmut13 (opt4)
aggagaaagcuuaccaugggccagaucaucaccuucuuccaggaggugccccacgugaucgaggaggugaugaacaucgugcugaucgcccugagccugcuggccauccugaagggccuguacaacaucgccaccugcggcaucaucggccugguggccuuccuguuccugugcggcaagagcugcagccugacccugaagggcggcuacgagcugcagacccuggagcugaacauggagacccugaacaugaccaugccccugagcugcaccaagaacagcagccaccacuacaucagagugggcaacgagaccggccuggagcugacccugaccaacaccagcaucaucaaccacaaguucugcaaccugagcgacgcccacaagaagaaccuguacgaccacgcccugaugagcaucaucagcaccuuccaccugagcauccccaacuucaaccaguacgaggccaugagcugcgacuucaacggcggcaagaucagcgugcaguacaaccugagccacagcuacgccggcgacgccgccgagcacugcggcaccguggccaacggcgugcugcagaccuucaugagaauggccuggggcggcagauacaucgcccuggacagcggcaagggcaacugggacugcaucaugaccagcuaccaguaccugaucauccagaacaccaccugggaggaccacugccaguucagcagacccagccccaucggcuaccugggccugcugagccagagaaccagagacaucuacaucagcagaagacugcugggcaccuucaccuggacccugagcgacagcgagggcaacgagacccccggcggcuacugccugaccagauggaugcugaucgaggccgagcugaagugcuucggcaacaccgccguggccaagugcaacgagaagcacgacgaggaguucugcgacaugcugagacuguucgacuucaacaagcaggccaucagaagacugaaggccgaggcccagaugagcauccagcugaucaacaaggccgugaacgcccugaucaacgaccagcugaucaugaagaaccaccugagagacaucaugggcauccccuacugcaacuacagcaaguacugguaccugaaccacaccagcagcggcagaaccagccugcccaagugcuggcugaucagcaacggcagcuaccugaacgagacccaguucagcgacgacaucgagcagcaggccgacaacaugaucaccgagaugcugcagaaggaguacaucgagagacagggcaagaccccccugggccugguggacaucuucaucuucagcaccagcuucuaccugaucagcaucuuccugcaccugaucaagauccccugaggacuaguuauaagacugacuagcccgaugggccucccaacgggcccuccuccccuccuugcaccgagauuaauaaaaaaaaaaaaaaaaaaaaaaaaaaaaaaaaaaaaaaaaaaaaaaaaaaaaaaaaaaaaaaaaaaaaaaaaaaaaaaaaaaaaaaaaaaaaaaaaaaaa

SEQ ID NO: 43239 - RNA, 1548 nt, Artificial Sequence
  mRNA product Design i-3 (A100) comprising derived and/or modified sequence from LASV(803213;Clade II)__AAF86703__GPCmut13 (opt4)
aggagaaagcuuaccaugggccagaucaucaccuucuuccaggaggugccccacgugaucgaggaggugaugaacaucgugcugaucgcccugagccugcuggccauccugaagggcaucuacaacguggccaccugcggccuguucggccugaucagcuuccugcugcugugcggcagaagcugcagcgugaccuacaagggcguguacgagcugcagacccuggagcugaacauggccaaccugaacaugaccaugccccugagcugcaccaagaacaacagccaccacuacaucauggugggcaacgagaccggccuggagcugacccugaccaacaccagcaucaucaaccacaaguucugcaaccugagcgacgcccacaagaagaaccuguacgaccacgcccugaugagcaucaucagcaccuuccaccugagcauccccaacuucaaccaguacgaggccaugagcugcgacuucaacggcggcaagaucagcgugcaguacaaccugagccacagcuucgccguggacgccgccaaccacugcggcaccaucgccaacggcgugcugcagaccuucaugagaauggccuggggcggcagcuacaucgcccuggacagcggcaagggcaacugggacugcaucaugaccagcuaccaguaccugaucauccagaacaccaccugggaggaccacugccaguucagcagacccagccccaucggcuaccugggccugcugagccagagaaccagagacaucuacaucagcagaagacugcugggcaccuucaccuggacccugagcgacagcgagggcaacgaggcccccggcggcuacugccugaccagauggaugcugaucgaggccgagcugaagugcuucggcaacaccgccguggccaagugcaacgagaagcacgacgaggaguucugcgacaugcugagacuguucgacuucaacaagcaggccaucaagagacugaagaccgaggcccagaugagcauccagcugaucaacaaggccgugaacgcccugaucaacgaccagcugaucaugaagaaccaccugagagacaucaugggcauccccuacugcaacuacagcagauacugguaccugaaccacaccgugaccggcaagaccagccugcccagaugcuggcuggugagcaacggcagcuaccugaacgagacccacuucagcgacgacaucgagcagcaggccgacaacaugaucaccgagaugcugcagaaggaguacauggacagacagggcaagaccccccugggccugguggaccuguucguguucagcaccagcuucuaccugaucagcaucuuccugcaccuggugaagauccccugaggacuaguuauaagacugacuagcccgaugggccucccaacgggcccuccuccccuccuugcaccgagauuaauaaaaaaaaaaaaaaaaaaaaaaaaaaaaaaaaaaaaaaaaaaaaaaaaaaaaaaaaaaaaaaaaaaaaaaaaaaaaaaaaaaaaaaaaaaaaaaaaaaaa

SEQ ID NO: 43240 - RNA, 1548 nt, Artificial Sequence
  mRNA product Design i-3 (A100) comprising derived and/or modified sequence from LASV(GA391;Clade III)__CAA36645__GPCmut13 (opt4)
aggagaaagcuuaccaugggccagaucgugaccuucuuccaggaggugccccacgugaucgaggaggugaugaacaucgugcugaucgcccugagcauccuggccauccugaagggccuguacaacguggccaccugcggccugaucggccuggugaccuuccugcugcugagcggcagaagcugcagccugaucuacaagggcaccuacgagcugcagacccuggagcugaacauggagacccugaacaugaccaugccccugagcugcaccaagaacaacagccaccacuacaucagagugggcaacgagaccggccuggagcugacccugaccaacaccagcauccugaaccacaaguucugcaaccugagcgacgcccacaagagaaaccuguacgaccacagccugaugagcaucaucagcaccuuccaccugagcauccccaacuucaaccaguacgaggccaugagcugcgacuucaacggcggcaagaucaccgugcaguacaaccugagccacagcuucgccguggacgccgccggccacugcggcacccuggccaacggcgugcugcagaccuucaugagaauggccuggggcggcagcuacaucgcccuggacagcggcagaggcaacugggacugcaucaugaccagcuaccaguaccugaucauccagaacaccaccugggacgaccacugccaguucagcagacccagccccaucggcuaccugggccugcugagccagagaaccagagacaucuacaucagcagaagacugcugggcaccuucaccuggacccugagcgacagcgagggcaacgagacccccggcggcuacugccugaccagauggaugcugaucgaggccgagcugaagugcuucggcaacaccgccguggccaagugcaacgagaagcacgacgaggaguucugcgacaugcugagacuguucgacuucaacaagcaggccaucagaagacugaagaccgaggcccagaugagcauccagcugaucaacaaggccgugaacgcccugaucaacgaccagcugaucaugaagaaccaccugagagacaucaugggcauccccuacugcaacuacagcagauacugguaccugaaccacaccagcaccggcaagaccagccugcccagaugcuggcugaucagcaacggcagcuaccugaacgagaccaaguucagcgacgacaucgagcagcaggccgacaacaugaucaccgagaugcugcagaaggaguacaucgacagacagggcaagaccccccugggccugguggaccuguucguguucagcaccagcuucuaccugaucagcaucuuccugcaccuggugaagauccccugaggacuaguuauaagacugacuagcccgaugggccucccaacgggcccuccuccccuccuugcaccgagauuaauaaaaaaaaaaaaaaaaaaaaaaaaaaaaaaaaaaaaaaaaaaaaaaaaaaaaaaaaaaaaaaaaaaaaaaaaaaaaaaaaaaaaaaaaaaaaaaaaaaaa

SEQ ID NO: 43241 - RNA, 1551 nt, Artificial Sequence
  mRNA product Design i-3 (A100) comprising derived and/or modified sequence from LASV(AV;Clade V)__CCA30314__GPCmut13 (opt4)
aggagaaagcuuaccaugggccagaucgugaccuucuuccaggaggugccccacgugaucgaggaggugaugaacaucgugcugaucgcccugagcauccuggccgugcugaagggccuguacaacaucgccaccugcggccugaucggccugaucaccuuccugcugcugugcggcagaagcugcagcagcaaccuguacaagggcguguacgagcugcagagccuggaccugaacauggagacccugaacaugaccaugccccugagcugcaccaagaacaacagccaccacuacaucagagugggcaacgacaccggccuggagcugacccugaccaacaccagcauccugaaccacaaguucugcaaccugagcgacgcccacaagaaggaccuguacgaccacgcccugaugagcaucaucagcaccuuccaccugagcauccccaacuucaaccaguacgaggccaugagcugcgacuucaacggcggcaagaucagcgugcaguacaaccugagccacagcuacgccaucgacgccgccaaccacugcggcaccguggccaacggcauccugcagaccuucaugagaauggccuggggcggcagcuacaucgcccuggacagcggcagaggcaacugggacugcaucaugaccagcuaccaguaccugaucauccagaacaccaccugggagaaccacugccaguucagcagacccagccccaucggcuaccugggccugcugagccagagaaccagagacaucuacaucagcagaagacugcugggcaccuucaccuggacccugagcgacagcgagggcaacgccacccccggcggcuacugccugaccagauggaugcugaucgaggccgagcugaagugcuucggcaacaccgccguggccaagugcaacgagaagcacgacgaggaguucugcgacaugcugagacuguucgacuucaacaagcaggccaucagcagacugaagagcgaggcccagaugagcauccagcugaucaacaaggccgugaacgcccugaucaacgaccagcugaucaugaagaaccaccugagagacaucaugggcauccccuacugcaacuacagcaaguacugguaccugaaccacaccaucaccggcaagaccagccugcccaagugcuggcuggugagcaacggcagcuaccugaacgagacccacuucagcgacgacaucgagcagcaggccgacaacaugaucaccgagaugcugcagaaggaguacauggagagacagggcaagaccccccugggccugguggaccuguucguguucagcaccagcuucuaccugaucagcaucuuccugagacuggugaagauccccugaggacuaguuauaagacugacuagcccgaugggccucccaacgggcccuccuccccuccuugcaccgagauuaauaaaaaaaaaaaaaaaaaaaaaaaaaaaaaaaaaaaaaaaaaaaaaaaaaaaaaaaaaaaaaaaaaaaaaaaaaaaaaaaaaaaaaaaaaaaaaaaaaaaa

SEQ ID NO: 43242 - RNA, 1548 nt, Artificial Sequence
  mRNA product Design i-3 (A100) comprising derived and/or modified sequence from LASV(Togo/2016/7082;Clade VI)__AMR44577__GPCmut13 (opt4)
aggagaaagcuuaccaugggccagaucaucaccuucuuccaggaggugccccacgugaucgaggaggugaugaacaucgugcugaucgcccugagccugcuggccauccugaagggcguguacaacguggccaccugcggcaucaucggccuggugaccuuccuguuccugugcggcagaagcugcagccugaucuacaagggcagcuacgagcugcagacccuggagcugaacauggagacccugaacaugaccaugccccugagcugcaccaagaacagcagccaccacuacaucagagugggcaacgagaccggccuggagcugacccugaccaacaccagcaucaucaaccacaaguucugcaaccugagcgacgcccacaagagaaaccuguacgaccacgcccugaugagcauccugagcaccuuccaccugagcauccccaacuucaaccaguacgaggccaugagcugcgacuucaacggcggcaagaucagcgugcaguacaaccugagccacgccuacgccguggacgccgccgagcacugcggcaccguggccaacggcgugcugcagaccuucaugagaauggccuggggcggcagcuacaucgcccuggacagcggcagaggcaacugggacugcaucaugaccagcuaccaguaccugaucauccagaacaccaccugggaggaccacugccaguucagcagacccagccccaucggcuaccugggccugcugagccagagaaccagagacaucuacaucagcagaagacugcugggcaccuucaccuggacccugagcgacagcgagggcaacgagacccccggcggcuacugccugaccagauggaugcugaucgaggccgagcugaagugcuucggcaacaccgccguggccaagugcaacgagaagcacgacgaggaguucugcgacaugcugagacuguucgacuucaacaagcaggccauccagagacugaagagcgaggcccagaugagcauccagcugaucaacaaggccgugaacgcccugaucaacgaccagcugaucaugaagaaccaccugagagacaugaugggcauccccuacugcaacuacagcaaguacugguaccugaaccacaccagcagcggcagaaccagccugcccaagugcuggcuggugagcaacggcagcuaccugaacgagacccacuucagcgacgacaucgagcagcaggccgacaacaugaucaccgagaugcugcagaaggaguacaucgacagacagggcaagaccccccugggccugguggaccuguucguguucagcaccagcuucuaccugaucagcaucuuccugcaccugaucaagauccccugaggacuaguuauaagacugacuagcccgaugggccucccaacgggcccuccuccccuccuugcaccgagauuaauaaaaaaaaaaaaaaaaaaaaaaaaaaaaaaaaaaaaaaaaaaaaaaaaaaaaaaaaaaaaaaaaaaaaaaaaaaaaaaaaaaaaaaaaaaaaaaaaaaaa

SEQ ID NO: 43243 - RNA, 1548 nt, Artificial Sequence
  mRNA product Design i-3 (A100) comprising derived and/or modified sequence from LASV(KAK-428;Clade n.d. (VII))__ANH09740__GPCmut13 (opt4)
aggagaaagcuuaccaugggccagaucgugaccuucuuccaggaggugccccacgugaucgaggaggugaugaacaucgugcugaucgcccugagccugcuggccauccugaagggccuguacaacuucgccaccugcggcgugaucggccugaucaccuuccugcugcugugcggcagaagcugcagcgccaccuacaagggccaguacgagcugcagacccuggagcugaacauggagagccugaacaugaccaugccccugagcugcaccaagaacaacagccaccacuacaucagagccggcaacaacaccggccuggagcugacccugaccaacaccagcaucaucagccacaaguucugcaaccugagcgacgcccacaagaagaaccuguacgaccacacccugaugagcaucaucaccaccuuccaccugagcauccccaacuucaaccaguacgaggccaugagcugcgacuucaacggcggcaagaucagcauccaguacaaccugagccacagcuacgccggcgacgccgcccagcacugcggcaccguggccaacggcgugcugcagaccuucaugagaauggccuggggcggcagcuaccuggcccuggacagcggcagaagaggcugggacugcaucaucagcagcuaccaguaccugaucauccagaacaccaccugggacgaccacugccaguucagcagacccagccccaucggcuaccugggcuucgugagccagaagaccagagacaucuacaucagcagaagacugcugggcaccuucaccuggacccugagcgacagcgagggccacgacaugcccggcggcuacugccugaccagauggaugcugaucgaggccgaccugaagugcuucggcaacaccgccguggccaagugcaacgagaagcacgacgaggaguucugcgacauguggagacuguucgacuucaacaagcaggccauccagagacugaaggccgaggcccagaugaacauccagcugaucaacaaggccgugaacgcccugaucaacgaccagcugaugaugaagaaccaccugagagacaucaugggcauccccuacugcaacuacagcaaguucugguaccugaacaacaccaccaccggcagaaccagccugcccagaugcuggcugaucagcaacggcagcuaccugaacgagacccacuucagcgacgacaucgagcagcaggccgacaacaugaucaccgagaugcugcagaaggaguacauggacagacagggcaagaccccccugggccugguggaccuguucguguucagcaccagcuucuaccugaucaccaucuuccugcaccuggugaagauccccugaggacuaguuauaagacugacuagcccgaugggccucccaacgggcccuccuccccuccuugcaccgagauuaauaaaaaaaaaaaaaaaaaaaaaaaaaaaaaaaaaaaaaaaaaaaaaaaaaaaaaaaaaaaaaaaaaaaaaaaaaaaaaaaaaaaaaaaaaaaaaaaaaaaa

SEQ ID NO: 43244 - RNA, 1548 nt, Artificial Sequence; identical to SEQ ID NO: 43238
  mRNA product Design i-3 (A100) comprising derived and/or modified sequence from LASV(Pinneo-NIG-1969;Clade I)__AIT17836__GPCmut13 (opt4)

SEQ ID NO: 43245 - RNA, 1548 nt, Artificial Sequence
  mRNA product Design i-3 (A100) comprising derived and/or modified sequence from LASV(ISTH0009-NIG-2011;Clade II)__AIT17404__GPCmut13 (opt4)
aggagaaagcuuaccaugggccagaucaucaccuucuuccaggaggugccccacgugaucgaggaggugaugaacaucgugcugaucgcccugagccugcuggccauccugaagggcaucuacaacguggccaccugcggccuguucggccuggugagcuuccugcugcugugcggcagaagcugcagcaccaccuacaagggcguguacgagcugcagacccuggagcuggacauggccagccugaacaugaccaugccccugagcugcaccaagaacaacagccaccacuacaucauggugggcaacgagaccggccuggagcugacccugaccaacaccagcaucaucaaccacaaguucugcaaccugagcgacgcccacaagaagaaccuguacgaccacgcccugaugagcaucaucagcaccuuccaccugagcauccccaacuucaaccaguacgaggccaugagcugcgacuucaacggcggcaagaucagcgugcaguacaaccugagccacgccuacgccguggacgccgccaaccacugcggcaccaucgccaacggcgugcugcagaccuucaugagaauggccuggggcggcagcuacaucgcccuggacagcggcaagggcagcugggacugcaucaugaccagcuaccaguaccugaucauccagaacaccaccugggaggaccacugccaguucagcagacccagccccaucggcuaccugggccugcugagccagagaaccagagacaucuacaucagcagaagacugcugggcaccuucaccuggacccugagcgacagcgagggcaacgagacccccggcggcuacugccugaccagauggaugcugaucgaggccgagcugaagugcuucggcaacaccgccguggccaagugcaacgagaagcacgacgaggaguucugcgacaugcugagacuguucgacuucaacaagcaggccaucagaagacugaagaccgaggcccagaugagcauccagcugaucaacaaggccgugaacgcccugaucaacgaccagcugaucaugaagaaccaccugagagacaucaugggcauccccuacugcaacuacagcaaguacugguaccugaaccacaccgugaccggcaagaccagccugcccagaugcuggcuggugagcaacggcagcuaccugaacgagacccacuucagcgacgacaucgagcagcaggccgacaacaugaucaccgagcugcugcagaaggaguacauggacagacagggcaagaccccccugggccugguggaccuguucguguucagcaccagcuucuaccugaucagcaucuuccugcaccugaucaagauccccugaggacuaguuauaagacugacuagcccgaugggccucccaacgggcccuccuccccuccuugcaccgagauuaauaaaaaaaaaaaaaaaaaaaaaaaaaaaaaaaaaaaaaaaaaaaaaaaaaaaaaaaaaaaaaaaaaaaaaaaaaaaaaaaaaaaaaaaaaaaaaaaaaaaa

SEQ ID NO: 43246 - RNA, 1548 nt, Artificial Sequence
  mRNA product Design i-3 (A100) comprising derived and/or modified sequence from LASV(ISTH2010-NIG-2012;Clade II)__AIT17482__GPCmut13 (opt4)
aggagaaagcuuaccaugggccagaucaucaccuucuuccaggaggugccccacgugaucgaggaggugaugaacaucgugcugaucgcccugagccugcuggccauccugaagggcaucuacaacguggccaccugcggccuguucggccuggugagcuuccugcugcugugcggcagaagcugcagcaccaccuacaagggcguguacgagcugcagacccuggagcuggacauggccagccugaacaugaccaugccccugagcugcaccaagaacaacagccaccacuacaucauggugggcaacgagaccggccuggagcugacccugaccaacaccagcaucaucaaccacaaguucugcaaccugagcgacgcccacaagaagaaccuguacgaccacgcccugaugagcaucaucagcaccuuccaccugagcauccccaacuucaaccaguacgaggccaugagcugcgacuucaacggcggcaagaucagcgugcaguacaaccugagccacgccuacgccguggacgccgccaaccacugcggcaccaucgccaacggcgugcugcagaccuucaugagaauggccuggggcggcagcuacaucgcccuggacagcggcaagggcagcugggacugcaucaugaccagcuaccaguaccugaucauccagaacaucaccugggaggaccacugccaguucagcagacccagccccaucggcuaccugggccugcugagccagagaaccagagacaucuacaucagcagaagacugcugggcaccuucaccuggacccugagcgacagcgagggcaacgagacccccggcggcuacugccugaccagauggaugcugaucgaggccgagcugaagugcuucggcaacaccgccguggccaagugcaacgagaagcacgacgaggaguucugcgacaugcugagacuguucgacuucaacaagcaggccaucagaagacugaagaccgaggcccagaugagcauccagcugaucaacaaggccgugaacgcccugaucaacgaccagcugaucaugaagaaccaccugagagacaucaugggcauccccuacugcaacuacagcaaguacugguaccugaaccacaccgugaccggcaagaccagccugcccagaugcuggcuggugagcaacggcagcuaccugaacgagacccacuucagcgacgacaucgagcagcaggccgacaacaugaucaccgagcugcugcagaaggaguacaucgacagacagggcaagaccccccugggccugguggaccuguucguguucagcaccagcuucuaccugaucagcaucuuccugcaccuggugaagauccccugaggacuaguuauaagacugacuagcccgaugggccucccaacgggcccuccuccccuccuugcaccgagauuaauaaaaaaaaaaaaaaaaaaaaaaaaaaaaaaaaaaaaaaaaaaaaaaaaaaaaaaaaaaaaaaaaaaaaaaaaaaaaaaaaaaaaaaaaaaaaaaaaaaaa

SEQ ID NO: 43247 - RNA, 1548 nt, Artificial Sequence
  mRNA product Design i-3 (A100) comprising derived and/or modified sequence from LASV(Lassa virus/H.sapiens-wt/NGA/2015/ISTH_0543;Clade II)__AVO03639__GPCmut13 (opt4)
aggagaaagcuuaccaugggccagaucaucaccuucuuccaggaggugccccacgugaucgaggaggugaugaacaucgugcugaucgcccugagccugcuggccauccugaagggcaucuacaacguggccaccugcggccuguucggccuggugagcuuccugcugcugugcggcagaagcugcagcaccaccuacaagggcguguacgagcugcagacccuggagcuggacauggccaaccugaacaugaccaugccccugagcugcaccaagaacaacagccaccacuacaucauggugggcaacgagaccggccuggagcugacccugaccaacaccagcaucaucaaccacaaguucugcaaccugagcgacgcccacaagaagaaccuguacgaccacgcccugaugagcaucaucagcaccuuccaccugagcauccccaacuucaaccaguacgaggccaugagcugcgacuucaacggcggcaagaucagcgugcaguacaaccugagccacaccuacgccguggacgccgccaaccacugcggcaccaucgccaacggcgugcugcagaccuucaugagaauggccuggggcggcagcuacaucgcccuggacagcggcaagggcagcugggacugcaucaugaccagcuaccaguaccuggugauccagaacaccaccugggaggaccacugccaguucagcagacccagccccaucggcuaccugggccugcugagccagagaaccagagacaucuacaucagcagaagacugcugggcaccuucaccuggacccugagcgacagcgagggcaacgagacccccggcggcuacugccugaccagauggaugcugaucgaggccgagcugaagugcuucggcaacaccgccguggccaagugcaacgagaagcacgacgaggaguucugcgacaugcugagacuguucgacuucaacaagcaggccaucagaagacugaagaccgaggcccagaugagcauccagcugaucaacaaggccgugaacgcccugaucaacgaccagcugaucaugaagaaccaccugagagacaucaugggcauccccuacugcaacuacagcaaguacugguaccugaaccacaccgugaccggcaagaccagccugcccagaugcuggcuggugagcaacggcagcuaccugaacgagacccacuucagcgacgacaucgagcagcaggccgacaacaugaucaccgagcugcugcagaaggaguacaucgacagacagggcaagaccccccugggccugguggaccuguucguguucagcaccagcuucuaccugaucagcaucuuccugcaccuggugaagauccccugaggacuaguuauaagacugacuagcccgaugggccucccaacgggcccuccuccccuccuugcaccgagauuaauaaaaaaaaaaaaaaaaaaaaaaaaaaaaaaaaaaaaaaaaaaaaaaaaaaaaaaaaaaaaaaaaaaaaaaaaaaaaaaaaaaaaaaaaaaaaaaaaaaaa

SEQ ID NO: 43248 - RNA, 1548 nt, Artificial Sequence
  mRNA product Design i-3 (A100) comprising derived and/or modified sequence from LASV(Lassa virus/H.sapiens-wt/NGA/2016/ISTH_0009;Clade II)__AVO03571__GPCmut13 (opt4)
aggagaaagcuuaccaugggccagaucaucaccuucuuccaggaggugccccacgugaucgaggaggugaugaacaucgugcugaucgcccugagccugcuggccauccugaagggcaucuacaacguggccaccugcggccugcugggccuggugagcuuccugcugcugugcggcagaagcugcagcaccaccuacaagggcguguacgagcugcagacccuggagcuggacauggccagccugaacaugaccaugccccugagcugcaccaagaacaacagccaccacuacaucauggugggcaacgagaccggccuggagcugacccugaccaacaccagcaucaucaaccacaaguucugcaaccugagcgacgcccacaagaagaaccuguacgaccacgcccugaugagcaucaucagcaccuuccaccugagcauccccaacuucaaccaguacgaggccaugagcugcgacuucaacggcggcagaaucagcgugcaguacaaccugagccacagcuacgccguggacgccgccaaccacugcggcaccaucgccaacggcgugcugcagaccuucaugagaauggccuggggcggcagcuacaucgcccuggacagcggcaagggcagcugggacugcaucaugaccagcuaccaguaccugaucauccagaacaccaccugggaggaccacugccaguucagcagacccagccccaucggcuaccugggccugcugagccagagaaccagagacaucuacaucagcagaagacugcugggcaccuucaccuggacccugagcgacagcgagggcaacgagacccccggcggcuacugccugaccagauggaugcugaucgaggccgagcugaagugcuucggcaacaccgccguggccaagugcaacgagaagcacgacgaggaguucugcgacaugcugagacuguucgacuucaacaagcaggccaucagaagacugaagaccgaggcccagaugagcauccagcugaucaacaaggccgugaacgcccugaucaacgaccagcugaucaugaagaaccaccugagagacaucaugggcauccccuacugcaacuacagcaaguacugguaccugaaccacaccgugaccggcaagaccagccugcccagaugcuggcuggugagcaacggcagcuaccugaacgagacccacuucagcgacgacaucgagcagcaggccgacaacaugaucaccgagcugcugcagaaggaguacaucgacagacagggcaagaccccccugggccugguggaccuguucguguucagcaccagcuucuaccugaucagcaucuuccugcaccuggugaagauccccugaggacuaguuauaagacugacuagcccgaugggccucccaacgggcccuccuccccuccuugcaccgagauuaauaaaaaaaaaaaaaaaaaaaaaaaaaaaaaaaaaaaaaaaaaaaaaaaaaaaaaaaaaaaaaaaaaaaaaaaaaaaaaaaaaaaaaaaaaaaaaaaaaaaa

SEQ ID NO: 43249 - RNA, 1548 nt, Artificial Sequence
  mRNA product Design i-3 (A100) comprising derived and/or modified sequence from LASV(Lassa virus/H.sapiens-wt/NGA/2016/ISTH_0017;Clade II)__AVO03567__GPCmut13 (opt4)
aggagaaagcuuaccaugggccagaucaucaccuucuuccaggaggugccccacgugaucgaggaggugaugaacaucgugcugaucgcccugagccugcuggccauccugaagggcaucuacaacguggccaccugcggccuguucggccuggugagcuuccugcugcugugcggcagaagcugcagcaccaccuacaagggcguguacgagcugcagacccuggagcuggacauggccagccugaacaugaccaugccccugagcugcaccaagaacaacagccaccacuacaucauggugggcaacgagaccggccuggagcugacccugaccaacaccagcaucaucaaccacaaguucugcaaccugagcgacgcccacaagaagaaccuguacgaccacgcccugaugagcaucaucagcaccuuccaccugagcauccccaacuucaaccaguacgaggccaugagcugcgacuucaacggcggcaagaucagcgugcaguacaaccugagccacaccuacgccaucgacgccgccaaccacugcggcaccaucgccaacggcgugcugcagaccuucaugagaauggccuggggcggcagcuacaucgcccuggacagcggcaagggcagcugggacugcaucaugaccagcuaccaguaccugaucauccagaacaccaccugggaggaccacugccaguucagcagacccagccccaucggcuaccugggccugcugagccagagaaccagagacaucuacaucagcagaagacugcugggcaccuucaccuggacccugagcgacagcgagggcaacgagacccccggcggcuacugccugaccagauggaugcugaucgaggccgagcugaagugcuucggcaacaccgccguggccaagugcaacgagaagcacgacgaggaguucugcgacaugcugagacuguucgacuucaacaagcaggccaucagaagacugaagaccgaggcccagaugagcauccagcugaucaacaaggccgugaacgcccugaucaacgaccagcugaucaugaagaaccaccugagagacaucaugggcauccccuacugcaacuacagcaaguacugguaccugaaccacaccgugaccggcaagaccagccugcccagaugcuggcuggugagcaacggcagcuaccugaacgagacccacuucagcgacgacaucgagcagcaggccgacaacaugaucaccgagcugcugcagaaggaguacauggacagacagggcaagaccccccugggccugguggaccuguucguguucagcaccagcuucuaccugaucagcaucuuccugcaccuggugagaauccccugaggacuaguuauaagacugacuagcccgaugggccucccaacgggcccuccuccccuccuugcaccgagauuaauaaaaaaaaaaaaaaaaaaaaaaaaaaaaaaaaaaaaaaaaaaaaaaaaaaaaaaaaaaaaaaaaaaaaaaaaaaaaaaaaaaaaaaaaaaaaaaaaaaaa

SEQ ID NO: 43250 - RNA, 1548 nt, Artificial Sequence
  mRNA product Design i-3 (A100) comprising derived and/or modified sequence from LASV(Lassa virus/H.sapiens-wt/NGA/2018/ISTH_0959;Clade II)__AVV65099__GPCmut13 (opt4)
aggagaaagcuuaccaugggccagaucaucaccuucuuccaggaggugccccacgugaucgaggaggugaugaacaucgugcugaucgcccugagccugcuggccauccugaagggcaucuacaacguggugaccugcggccuguucggccuggugagcuuccugcugcugugcggcagaagcugcagcaccaccuacaagggcguguacgagcugcagacccuggagcuggacauggccagccugaacaugaccaugccccugagcugcaccaagaacaacagccaccacuacaucauggugggcaacgagaccggccuggagcugacccugaccaacaccagcaucaucaaccacaaguucugcaaccugagcgacgcccacaagaagaaccuguacgaccacgcccugaugagcaucaucagcaccuuccaccugagcauccccaacuucaaccaguacgaggccaugagcugcgacuucaacggcggcaagaucagcgugcaguacaaccugagccacgccuacgccaucgacgccgccaaccacugcggcaccaucgccaacggcgugcugcagaccuucaugagaauggccuggggcggcagcuacaucgcccuggacagcggcaagggcagcugggacugcaucaugaccagcuaccaguaccugaucauccagaacaccaccugggaggaccacugccaguucagcagacccagccccaucggcuaccugggccugcugagccagagaaccagagacaucuacaucagcagaagacugcugggcaccuucaccuggacccugagcgacagcgagggcaacgagacccccggcggcuacugccugaccagauggaugcugaucgaggccgagcugaagugcuucggcaacaccgccguggccaagugcaacgagaagcacgacgaggaguucugcgacaugcugagacuguucgacuucaacaagcaggccaucagaagacugaagaccgaggcccagaugagcauccagcugaucaacaaggccgugaacgcccugaucaacgaccagcugaucaugaagaaccaccugagagacaucaugggcauccccuacugcaacuacagcaaguacugguaccugaaccacaccgugaccggcaagaccagccugcccagaugcuggcuggugagcaacggcagcuaccugaacgagacccacuucagcgacgacaucgagcagcaggccgacaacaugaucaccgagcugcugcagaaggaguacaucgacagacagggcaagaccccccugggccugguggaccuguucguguucagcaccagcuucuaccugaucagcaucuuccugcaccuggugaagauccccugaggacuaguuauaagacugacuagcccgaugggccucccaacgggcccuccuccccuccuugcaccgagauuaauaaaaaaaaaaaaaaaaaaaaaaaaaaaaaaaaaaaaaaaaaaaaaaaaaaaaaaaaaaaaaaaaaaaaaaaaaaaaaaaaaaaaaaaaaaaaaaaaaaaa

SEQ ID NO: 43251 - RNA, 1548 nt, Artificial Sequence
  mRNA product Design i-3 (A100) comprising derived and/or modified sequence from LASV(LASV003-NIG-2008;Clade II)__AIT17580__GPCmut13 (opt4)
aggagaaagcuuaccaugggccagaucaucaccuucuuccaggaggugccccacgugaucgaggaggugaugaacaucgugcugaucgcccugagccugcuggccauccugaagggcaucuacaacguggccaccugcggccuguucggccuggugagcuuccugcugcugugcggcagaagcugcagcaccaccuacaagggcguguacgagcugcagacccuggagcuggacauggccagccugaacaugaccaugccccugagcugcaccaagaacaacagccaccacuacaucauggugggcaacgagaccggccuggagcugacccugaccaacaccagcaucaucaaccacaaguucugcaaccugagcgacgcccacaagaagaaccuguacgaccacgcccugaugagcaucaucagcaccuuccaccugagcauccccaacuucaaccaguacgaggccaugagcugcgacuucaacggcggcaagaucagcgugcaguacaaccugagccacaccuacgccguggacgccgccaaccacugcggcaccaucgccaacggcgugcugcagaccuucaugagaauggccuggggcggcagcuacaucgcccuggacagcggcaagggcagcugggacugcaucaugaccagcuaccaguaccugaucauccagaacaccaccugggaggaccacugccaguucagcagacccagccccaucggcuaccugggccugcugagccagagaaccagagacaucuacaucagcagaagacugcugggcaccuucaccuggacccugagcgacagcgagagcaacgagacccccggcggcuacugccugaccagauggaugcugaucgaggccgagcugaagugcuucggcaacaccgccguggccaagugcaacgagaagcacgacgaggaguucugcgacaugcugagacuguucgacuucaacaagcaggccaucagaagacugaaggccgaggcccagaugagcauccagcugaucaacaaggccgugaacgcccugaucaacgaccagcugaucaugaagaaccaccugagagacaucaugggcauccccuacugcaacuacagcaaguacugguaccugaaccacaccgugaccggcagaaccagccugcccagaugcuggcuggugagcaacggcagcuaccugaacgagacccacuucagcgacgacaucgagcagcaggccgacaacaugaucaccgagcugcugcagaaggaguacauggacagacagggcaagaccccccugggccugguggaccuguucguguucagcaccagcuucuaccugaucagcaucuuccugcaccuggugaagauccccugaggacuaguuauaagacugacuagcccgaugggccucccaacgggcccuccuccccuccuugcaccgagauuaauaaaaaaaaaaaaaaaaaaaaaaaaaaaaaaaaaaaaaaaaaaaaaaaaaaaaaaaaaaaaaaaaaaaaaaaaaaaaaaaaaaaaaaaaaaaaaaaaaaaa

SEQ ID NO: 43252 - RNA, 1548 nt, Artificial Sequence
  mRNA product Design i-3 (A100) comprising derived and/or modified sequence from LASV(LASV035-NIG-2009;Clade II)__AIT17588__GPCmut13 (opt4)
aggagaaagcuuaccaugggccagaucaucaccuucuuccaggaggugccccacgugaucgaggaggugaugaacaucgugcugaucgcccugagccugcuggccauccugaagggcaucuacaacguggccaccugcggccuguucggccuggugagcuuccugcugcugugcggcagaagcugcagcaccaccuacaagggcguguacgagcugcagacccuggagcuggacauggccagccugaacaugaccaugccccugagcugcaccaagaacaacagccaccacuacaucauggugggcaacgagaccggccuggagcugacccugaccaacaccagcaucaucaaccacaaguucugcaaccugagcgacgcccacaagaagaaccuguacgaccacgcccugaugagcaucaucagcaccuuccaccugagcauccccaacuucaaccaguacgaggccaugagcugcgacuucaacggcggcaagaucagcgugcaguacaaccugagccacgccuacgccguggacgccgccaaccacugcggcaccaucgccaacggcgugcugcagaccuucaugagaauggccuggggcggcagcuacaucgcccuggacagcggcaagggcagcugggacugcaucaugaccagcuaccaguaccugaucauccagaacaccaccugggaggaccacugccaguucagcagacccagccccaucggcuaccugggccugcugagccagagaaccagagacaucuacaucagcagaagacugcugggcaccuucaccuggacccugagcgacagcgagggcaacgagacccccggcggcuacugccugaccagauggaugcugaucgaggccgagcugaagugcuucggcaacaccgccguggccaagugcaacgagaagcacgacgaggaguucugcgacaugcugagacuguucgacuucaacaagcaggccaucagaagacugaaggccgaggcccagaugagcauccagcugaucaacaaggccgugaacgcccugaucaacgaccagcugaucaugaagaaccaccugagagacaucaugggcauccccuacugcaacuacagcaaguacugguaccugaaccacaccgugaccggcaagaccagccugcccagaugcuggcuggugagcaacggcagcuaccugaacgagacccacuucagcgacgacaucgagcagcaggccgacaacaugaucaccgagcugcugcagaaggaguacaucgacagacagggcaagaccccccugggccugguggaccuguucguguucagcaccagcuucuaccugaucagcaucuuccugcaccuggugaagauccccugaggacuaguuauaagacugacuagcccgaugggccucccaacgggcccuccuccccuccuugcaccgagauuaauaaaaaaaaaaaaaaaaaaaaaaaaaaaaaaaaaaaaaaaaaaaaaaaaaaaaaaaaaaaaaaaaaaaaaaaaaaaaaaaaaaaaaaaaaaaaaaaaaaaa

SEQ ID NO: 43253 - RNA, 1548 nt, Artificial Sequence
  mRNA product Design i-3 (A100) comprising derived and/or modified sequence from LASV(LASV1000-NIG-2009;Clade II)__AIT17782__GPCmut13 (opt4)
aggagaaagcuuaccaugggccagaucaucaccuucuuccaggaggugccccacgugaucgaggaggugaugaacaucgugcugaucgcccugagccugcuggccauccugaagggcaucuacaacguggccaccugcggccuguucggccuggugagcuuccugcugcugugcggcagaagcugcagcaccaccuacaagggcguguacgagcugcagacccuggagcuggacauggccagccugaacaugaccaugccccugagcugcaccaagaacaacagccaccacuacaucauggugggcaacgagaccggccuggagcugacccugaccaacaccagcaucaucaaccacaaguucugcaaccugagcgacgcccacaagaagaaccuguacgaccacgcccugaugagcaucaucagcaccuuccaccugagcauccccaacuucaaccaguacgaggccaugagcugcgacuucaacggcggcaagaucagcgugcaguacaaccugagccacaccuacgccguggacgccgccaaccacugcggcaccaucgccaacggcgugcugcagaccuucaugagaauggccuggggcggcagcuacaucgcccuggacagcggcaagggcagcugggacugcaucaugaccagcuaccaguaccugaucauccagaacaccaccugggaggaccacugccaguucagcagacccagccccaucggcuaccugggccugcugagccagagaaccagagacaucuacaucagcagaagacugcugggcaccuucaccuggacccugagcgacagcgagggcaacgagacccccggcggcuacugccugaccagauggaugcugaucgaggccgagcugaagugcuucggcaacaccgccguggccaagugcaacgagaagcacgacgaggaguucugcgacaugcugagacuguucgacuucaacaagcaggccaucaagagacugaagaccgaggcccagaugagcauccagcugaucaacaaggccgugaacgcccugaucaacgaccagcugaucaugaagaaccaccugagagacaucaugggcauccccuacugcaacuacagcaaguacugguaccugaaccacaccgugaccggcaagaccagccugcccagaugcuggcuggugagcaacggcagcuaccugaacgagacccacuucagcgacgacaucgagcagcaggccgacaacaugaucaccgagcugcugcagaaggaguacaucgacagacagggcaagaccccccugggccugguggaccuguucguguucagcaccagcuucuaccugaucagcaucuuccugcaccuggugaagauccccugaggacuaguuauaagacugacuagcccgaugggccucccaacgggcccuccuccccuccuugcaccgagauuaauaaaaaaaaaaaaaaaaaaaaaaaaaaaaaaaaaaaaaaaaaaaaaaaaaaaaaaaaaaaaaaaaaaaaaaaaaaaaaaaaaaaaaaaaaaaaaaaaaaaa

SEQ ID NO: 43254 - RNA, 1548 nt, Artificial Sequence
  mRNA product Design i-3 (A100) comprising derived and/or modified sequence from LASV(LASV221-NIG-2010;Clade II)__AIT17624__GPCmut13 (opt4)
aggagaaagcuuaccaugggccagaucaucaccuucuuccaggaggugccccacgugaucgaggaggugaugaacaucgugcugaucgcccugagccugcuggccauccugaagggcaucuacaacguggccaccugcggccuguucggccuggugagcuuccugcugcugugcggcagaagcugcagcaccaccuacaagggcguguacgagcugcagacccuggagcuggacauggccagccugaacaugaccaugccccugagcugcaccaagaacaacagccaccacuacaucauggugggcaacgagaccggccuggagcugacccugaccaacaccagcaucaucaaccacaaguucugcaaccugagcgacgcccacaagaagaaccuguacgaccacgcccugaugagcaucaucagcaccuuccaccugagcauccccaacuucaaccaguacgaggccaugagcugcgacuucaacggcggcaagaucagcgugcaguacaaccugagccacaccuacgccaucgacgccgccaaccacugcggcaccaucgccaacggcgugcugcagaccuucaugagaauggccuggggcggcagcuacaucgcccuggacagcggcaagggcagcugggacugcaucaugaccagcuaccaguaccugaucauccagaacaccaccugggaggaccacugccaguucagcagacccagccccaucggcuaccugggccugcugagccagagaaccagagacaucuacaucagcagaagacugcugggcaccuucaccuggacccugagcgacagcgagggcaacgagacccccggcggcuacugccugaccagauggaugcugaucgaggccgagcugaagugcuucggcaacaccgccguggccaagugcaacgagaagcacgacgaggaguucugcgacaugcugagacuguucgacuucaacaagcaggccaucagaagacugaagaccgaggcccagaugagcauccagcugaucaacaaggccgugaacgcccugaucaacgaccagcugaucaugaagaaccaccugagagacaucaugggcauccccuacugcaacuacagcaaguacugguaccugaaccacaccgugaccggcaagaccagccugcccagaugcuggcuggugagcaacggcagcuaccugaacgagacccacuucagcgacgacaucgagcagcaggccgacaacaugaucaccgagaugcugcagaaggaguacauggacagacagggcaagaccccccugggccugguggaccuguucguguucagcaccagcuucuaccugaucagcaucuuccugcaccuggugaagauccccugaggacuaguuauaagacugacuagcccgaugggccucccaacgggcccuccuccccuccuugcaccgagauuaauaaaaaaaaaaaaaaaaaaaaaaaaaaaaaaaaaaaaaaaaaaaaaaaaaaaaaaaaaaaaaaaaaaaaaaaaaaaaaaaaaaaaaaaaaaaaaaaaaaaa

SEQ ID NO: 43255 - RNA, 1548 nt, Artificial Sequence
  mRNA product Design i-3 (A100) comprising derived and/or modified sequence from LASV(LASV237-NIG-2010;Clade II)__AIT17638__GPCmut13 (opt4)
aggagaaagcuuaccaugggccagaucaucaccuucuuccaggaggugccccacgugaucgaggaggugaugaacaucgugcugaucgcccugagccugcuggccauccugaagggcaucuacaacguggccaccugcggccuguucggccuggugagcuuccugcugcugugcggcagaagcugcagcaccaccuacaagggcguguacgagcugcagacccuggagcuggacauggccagccugaacaugaccaugccccugagcugcaccaagaacaacagccaccacuacaucauggugggcaacgagaccggccuggagcugacccugaccaacaccagcaucaucaaccacaaguucugcaaccugagcgacgcccacaagaaggaccuguacgaccacgcccugaugagcaucaucagcaccuuccaccugagcauccccaacuucaaccaguacgaggccaugagcugcgacuucaacggcggcaagaucagcgugcaguacaaccugagccacaccuacgccguggacgccgccaaccacugcggcaccaucgccaacggcgugcugcagaccuucaugagaauggccuggggcggcagcuacaucgcccuggacagcggcaagggcagcugggacugcaucaugaccagcuaccaguaccugaucauccagaacaccaccugggaggaccacugccaguucagcagacccagccccaucggcuaccugggccugcugagccagagaaccagagacaucuacaucagcagaagacugcugggcaccuucaccuggacccugagcgacagcgagggcaacgagacccccggcggcuacugccugaccagauggaugcugaucgaggccgagcugaagugcuucggcaacaccgccguggccaagugcaacgagaagcacgacgaggaguucugcgacaugcugagacuguucgacuucaacaagcaggccaucagaagacugaagaccgaggcccagaugagcauccagcugaucaacaaggccgugaacgcccugaucaacgaccagcugaucaugaagaaccaccugagagacaucaugggcauccccuacugcaacuacagcaaguacugguaccugaaccacaccgugaccggcaagaccagccugcccagaugcuggcuggugagcaacggcagcuaccugaacgagacccacuucagcgacgacaucgagcagcaggccgacaacaugaucaccgagcugcugcagaaggaguacauggacagacagggcaagaccccccugggccugguggaccuguucguguucagcaccagcuucuaccugaucagcaucuuccugcaccugaucaagauccccugaggacuaguuauaagacugacuagcccgaugggccucccaacgggcccuccuccccuccuugcaccgagauuaauaaaaaaaaaaaaaaaaaaaaaaaaaaaaaaaaaaaaaaaaaaaaaaaaaaaaaaaaaaaaaaaaaaaaaaaaaaaaaaaaaaaaaaaaaaaaaaaaaaaa

SEQ ID NO: 43256 - RNA, 1548 nt, Artificial Sequence
  mRNA product Design i-3 (A100) comprising derived and/or modified sequence from LASV(LASV253-NIG-2011;Clade II)__AIT17670__GPCmut13 (opt4)
aggagaaagcuuaccaugggccagaucaucaccuucuuccaggaggugccccacgugaucgaggaggugaugaacaucgugcugaucgcccugagccugcuggccauccugaagggcaucuacaacguggccaccugcggccuguucggccuggugagcuuccugcugcugugcggcagaagcugcagcaccaccuacaagggcguguacgagcugcagacccuggagcuggacauggccagccugaacaugaccaugccccugagcugcaccaagaacaacagccaccacuacaucauggugggcaacgagaccggccuggagcugacccugaccaacaccagcaucaucaaccacaaguucugcaaccugagcgacgcccacaagaagaaccuguacgaccacgcccugaugagcaucaucagcaccuuccaccugagcauccccaacuucaaccaguacgaggccaugagcugcgacuucaacggcggcaagaucagcgugcaguacaaccugagccacaccuacgccguggacgccgccaaccacugcggcaccaucgccaacggcgugcugcagaccuucaugagaauggccuggggcggcagcuacaucgcccuggacagcggcaagggcagcugggacugcaucaugaccagcuaccaguaccugaucauccagaacaccaccugggaggaccacugccaguucagcagacccagccccaucggcuaccugggccugcugagccagagaaccagagacaucuacaucagcagaagacugcugggcaccuucaccuggacccugagcgacagcgagggcaacgagacccccggcggcuacugccugaccagauggaugcugaucgaggccgagcugaagugcuucggcaacaccgccguggccaagugcaacgagaagcacgacgaggaguucugcgacaugcugagacuguucgacuucaacaagcaggccaucagaagacugaaggccgaggcccagaugagcauccagcugaucaacaaggccgugaacgcccugaucaacgaccagcugaucaugaagaaccaccugagagacaucaugggcauccccuacugcaacuacagcaaguacugguaccugaaccacaccgugaccggcagaaccagccugcccagaugcuggcuggugagcaacggcagcuaccugaacgagacccacuucagcgacgacaucgagcagcaggccgacaacaugaucaccgagcugcugcagaaggaguacaucgacagacagggcaagaccccccugggccugguggaccuguucguguucagcaccagcuucuaccugaucagcaucuuccugcaccuggugaagauccccugaggacuaguuauaagacugacuagcccgaugggccucccaacgggcccuccuccccuccuugcaccgagauuaauaaaaaaaaaaaaaaaaaaaaaaaaaaaaaaaaaaaaaaaaaaaaaaaaaaaaaaaaaaaaaaaaaaaaaaaaaaaaaaaaaaaaaaaaaaaaaaaaaaaa

SEQ ID NO: 43257 - RNA, 1548 nt, Artificial Sequence
  mRNA product Design i-3 (A100) comprising derived and/or modified sequence from LASV(LASV254-NIG-2011;Clade II)__AIT17674__GPCmut13 (opt4)
aggagaaagcuuaccaugggccagaucaucaccuucuuccaggaggugccccacgugaucgaggaggugaugaacaucgugcugaucgcccugagccugcuggccauccugaagggcaucuacaacguggccaccugcggccuguucggccuggugagcuuccugcugcugugcggcagaagcugcagcaccaccuacaagggcguguacgagcugcagacccuggagcuggacaugaccaaccugaacaugaccaugccccugagcugcaccaagaacaacagccaccacuacaucauggugggcaacgagaccggccuggagcugacccugaccaacaccagcaucaucaaccacaaguucugcaaccugagcgacgcccacaagaagaaccuguacaaccacgcccugaugagcaucaucagcaccuuccaccugagcauccccaacuucaaccaguacgaggccaugagcugcgacuucaacggcggcaagaucagcgugcaguacaaccugagccacagcuacgccguggacgccgccaaccacugcggcaccaucgccaacggcgugcugcagaccuucaugagaauggccuggggcggcagcuacaucgcccuggacagcggcaagggcaacugggacugcaucaugaccagcuaccaguaccugaucauccagaacaccaccugggaggaccacugccaguucagcagacccagccccaucggcuaccugggccugcugagccagagaaccagagacaucuacaucagcagaagacugcugggcaccuucaccuggacccugagcgacagcgagggcaacgagacccccggcggcuacugccugaccagauggaugcugaucgaggccgagcugaagugcuucggcaacaccgccguggccaagugcaacgagaagcacgacgaggaguucugcgacaugcugagacuguucgacuucaacaagcaggccaucagaagacugaagaccgaggcccaggccaacauccagcugaucaacaaggccgugaacgcccugaucaacgaccagcugaucaugaagaaccaccugagagacaucaugggcauccccuacugcaacuacagcaaguacugguaccugaaccacaccgugaccggcaagaccagccugcccagaugcuggcuggugagcaacggcagcuaccugaacgagacccacuucagcgacgacaucgagcagcaggccgacaacaugaucaccgagcugcugcagaaggaguacauggacagacagggcaagaccccccugggccugguggaccuguucguguucagcaccagcuucuaccugaucagcaucuuccugcaccuggugaagauccccugaggacuaguuauaagacugacuagcccgaugggccucccaacgggcccuccuccccuccuugcaccgagauuaauaaaaaaaaaaaaaaaaaaaaaaaaaaaaaaaaaaaaaaaaaaaaaaaaaaaaaaaaaaaaaaaaaaaaaaaaaaaaaaaaaaaaaaaaaaaaaaaaaaaa

SEQ ID NO: 43258 - RNA, 1548 nt, Artificial Sequence
  mRNA product Design i-3 (A100) comprising derived and/or modified sequence from LASV(Nig08-A19;Clade III)__ADU56618__GPCmut13 (opt4)
aggagaaagcuuaccaugggccagaucgugaccuucuuccaggaggugccccacgugaucgaggaggugaugaacaucgugcugaucgcccugagcauccuggccauccugaagggccuguacaacaucgccaccugcggccugaucggccuggugaccuuccugcugcugagcggcagaagcugcagcaugaccuacaagggcguguacgagcugcagacccuggagcugaacaugaacacccugaacaugaccaugccccugagcugcaccaagaacaacagccaccacuacaucauggugggcaacgagaccggccuggagcugacccugaccaacaccagccugcugcaccacaaguucugcaaccugagcgacgcccacaagaagaaccuguacgaccacacccugaugagcaucaucagcaccuuccaccugagcauccccaacuucaaccaguacgaggccaugagcugcgacuucaacggcggcaagaucaccgugcaguacaaccugagccacagcuacgccaucgacgccgccaaccacugcggcaccguggccaacggcgugcugcagaccuucaugagaauggccuggggcggcagcuacaucgcccuggacagcggcagaggcaagugggacugcaucaugaccagcuaccaguaccugaucauccagaacaccaccugggaggaccacugccaguucagcagacccagccccaucggcuaccugggccugcugagccagagaaccagagacaucuacaucagcagaagacugcugggcaccuucaccuggacccugagcgacagcgagggcaacgagacccccggcggcuacugccugaccagauggaugcugaucgaggccgagcugaagugcuucggcaacaccgccguggccaagugcaacgagaagcacgacgaggaguucugcgacaugcugagacuguucgacuucaacaagcaggccaucagaagacugaaggccgaggcccagaugagcauccagcugaucaacaaggccgugaacgcccugaucaacgaccagcugaucaugaagaaccaccugagagacaucaugggcauccccuacugcaacuacagcaaguacugguaccugaaccacaccagcaccggcagaaccagccugcccagaugcuggcuggugagcaacggcagcuaccugaacgagacccacuucagcgacgacaucgagcagcaggccgacaacaugaucaccgagaugcugcagaaggaguaccuggacagacagggcaagaccccccugggccugguggaccuguucguguucagcaccagcuucuaccugaucagcaucuuccugcaccuggugaagauccccugaggacuaguuauaagacugacuagcccgaugggccucccaacgggcccuccuccccuccuugcaccgagauuaauaaaaaaaaaaaaaaaaaaaaaaaaaaaaaaaaaaaaaaaaaaaaaaaaaaaaaaaaaaaaaaaaaaaaaaaaaaaaaaaaaaaaaaaaaaaaaaaaaaaa

SEQ ID NO: 43259 - RNA, 1551 nt, Artificial Sequence
  mRNA product Design i-3 (A100) comprising derived and/or modified sequence from LASV(G1180-SLE-2010;Clade IV)__AIT17168__GPCmut13 (opt4)
aggagaaagcuuaccaugggccagaucgugaccuucuuccaggaggugccccacgugaucgaggaggugaugaacaucgugcugaucgcccugagcauccuggccgugcugaagggccuguacaacuucgccaccugcggccuggugggccugcugaccuuccugcugcugugcggcagaagcugcaccgccagcagauacaagggcguguacgagcugcagacccuggagcugaacauggagacccugaacaugaccaugccccugagcugcaccaagaacaacagccaccacuacaucauggugggcaacgagaccggccuggagcugacccugaccaacaccagcaucaucaaccacaaguucugcaaccugagcgacgcccacaagaagaaccuguacgaccacgcccugaugagcaucaucagcaccuuccaccugagcauccccaacuucaaccaguacgaggccaugagcugcgacuucaacggcggcaagaucagcgugcaguacaaccugagccacagcuacgccggcgacgccgccaaccacugcggcaccguggccaacggcgugcugcagaccuucaugagaauggccuggggcggcagcuacaucgcccuggacagcggccacggcagcugggacugcaucaugaccagcuaccaguaccugaucauccagaacaccaccugggaggaccacugccaguucagcagacccagccccaucggcuaccugggccugcugagccagagaaccagagacaucuacaucagcagaagacugcugggcaccuucaccuggacccugagcgacagcgagggcaaggacacccccggcggcuacugccugaccagauggaugcugaucgaggccgagcugaagugcuucggcaacaccgccguggccaagugcaacgagaagcacgacgaggaguucugcgacaugcugagacuguucgacuucaacaagcaggccauccagagacugaaggccgaggcccagaugagcauccagcugaucaacaaggccgugaacgcccugaucaacgaccagcugaucaugaagaaccaccugagagacaucaugggcauccccuacugcaacuacagcaaguacugguaccugaaccacaccaccaccggcaagaccagccugcccaagugcuggcuggugagcaacggcagcuaccugaacgagacccacuucagcgacgacaucgagcagcaggccgacaacaugaucaccgagaugcugcagaaggaguacauggagagacagggcaagaccccccugggccugguggaccuguucguguucagcaccagcuucuaccugaucagcaucuuccugcaccuggugaagauccccugaggacuaguuauaagacugacuagcccgaugggccucccaacgggcccuccuccccuccuugcaccgagauuaauaaaaaaaaaaaaaaaaaaaaaaaaaaaaaaaaaaaaaaaaaaaaaaaaaaaaaaaaaaaaaaaaaaaaaaaaaaaaaaaaaaaaaaaaaaaaaaaaaaaa

SEQ ID NO: 43260 - RNA, 1551 nt, Artificial Sequence
  mRNA product Design i-3 (A100) comprising derived and/or modified sequence from LASV(G1442-SLE-2011;Clade IV)__AIT17180__GPCmut13 (opt4)
aggagaaagcuuaccaugggccagaucgugaccuucuuccaggaggugccccacgugaucgaggaggugaugaacaucgugcugaucgcccugagcauccuggccgugcugaagggccuguacaacguggccaccugcggccugaucggccuggugaccuuccugcugcugugcggcagaagcugcaccaccacccuguacaagggcguguacgagcugcagacccuggagcugaacauggagacccugaacaugaccaugccccugagcugcaccaagaacaacagccaccacuacaucagagugggcaacgagaccggccuggagcugacccugaccaacaccagcaucaucaaccacaaguucugcaaccugagcgacgcccacaagaagaaccuguacgaccacgcccugaugagcaucaucagcaccuuccaccugagcauccccaacuucaaccaguacgaggccaugagcugcgacuucaacggcggcaagaucagcgugcaguacaaccugagccacagcuacgccggcgacgccgccaaccacugcggcaccguggccaacggcgugcugcagaccuucaugagaauggccuggggcggcagcuacaucgcccuggacagcggcagaggcaacugggacugcaucaugaccagcuaccaguaccugaucauccagaacaccaccugggacgaccacugccaguucagcagacccagccccaucggcuaccugggccugcugagccagagaaccagagacguguacaucagcagaagacugcugggcaccuucaccuggacccugagcgacagcgagggcaaggacacccccggcggcuacugccugaccagauggaugcugaucgaggccgagcugaagugcuucggcaacaccgccguggccaagugcaacgagaagcacgacgaggaguucugcgacaugcugagacuguucgacuucaacaagcaggccauccagagacugaaggccgaggcccagaugagcauccagcugaucaacaaggccgugaacgcccugaucaacgaccagcugaucaugaagaaccaccugagagacaucaugggcauccccuacugcaacuacagcaaguacugguaccugaacaacaccgccaccggcaagaccagccugcccaagugcuggcugaucagcaacggcagcuaccugaacgagacccacuucagcgacgacaucgagcaggaggccgacaacaugaucaccgagaugcugcagaaggaguacauggagagacagggcaagaccccccugggccugguggaccuguucguguucagcaccagcuucuaccugaucagcaucuuccugcaccuggugaagauccccugaggacuaguuauaagacugacuagcccgaugggccucccaacgggcccuccuccccuccuugcaccgagauuaauaaaaaaaaaaaaaaaaaaaaaaaaaaaaaaaaaaaaaaaaaaaaaaaaaaaaaaaaaaaaaaaaaaaaaaaaaaaaaaaaaaaaaaaaaaaaaaaaaaaa

SEQ ID NO: 43261 - RNA, 1551 nt, Artificial Sequence
  mRNA product Design i-3 (A100) comprising derived and/or modified sequence from LASV(G3010-SLE-2013;Clade IV)__AIT17344__GPCmut13 (opt4)
aggagaaagcuuaccaugggccagaucgugaccuucuuccaggaggugccccacgugaucgaggaggugaugaacaucgugcugaucgcccugagcauccuggccgugcugaagggccuguacaacuucgccaccugcggccuggugggccuggugaccuuccugcugcugugcggcagaagcugcaccaccagccuguacaagggcguguacgagcugcagacccuggagcugaacauggagacccugaacaugaccaugccccugagcugcaccaagaacaacagccaccacuacaucauggugggcaacgagaccggccuggagcugacccugaccaacaccagcaucaucaaccacaaguucugcaaccugagcgacgcccacaagaagaaccuguacaaccacgcccugaugagcaucaucagcaccuuccaccugagcauccccaacuucaaccaguacgaggccaugagcugcgacuucaacggcggcaagaucagcgugcaguacaaccugagccacagcuacgccggcgacgccgccagccacugcggcaccguggccaacggcgugcugcagaccuucaugagaauggccuggggcggcagcuacaucgcccuggacagcggcuacggcaagugggacugcaucaugaccagcuaccaguaccugaucauccagaacaccaccugggaggaccacugccaguucagcagacccagccccaucggcuaccugggccugcugagccagagaaccagagacaucuacaucagcagaagacugcugggcaccuucaccuggacccugagcgacagcgagggcaaggacacccccggcggcuacugccugaccagauggaugcugaucgaggccgagcugaagugcuucggcaacaccgccguggccaagugcaacgagaagcacgacgaggaguucugcgacaugcugagacuguucgacuucaacaagcaggccauccagagacugaagaccgaggcccagaugagcauccagcugaucaacaaggccgugaacgcccugaucaacgaccagcugaucaugaagaaccaccugagagacaucaugggcauccccuacugcaacuacagcaaguacugguaccugaaccacaccaccaccggcaagaccagccugcccaagugcuggcuggugagcaacggcagcuaccugaacgagacccacuucagcgacgacaucgagcagcaggccgacaacaugaucaccgagaugcugcagaaggaguacauggagagacagggcaagaccccccugggccugguggaccuguucguguucagcaccagcuucuaccugaucagcaucuuccugcaccuggugaagauccccugaggacuaguuauaagacugacuagcccgaugggccucccaacgggcccuccuccccuccuugcaccgagauuaauaaaaaaaaaaaaaaaaaaaaaaaaaaaaaaaaaaaaaaaaaaaaaaaaaaaaaaaaaaaaaaaaaaaaaaaaaaaaaaaaaaaaaaaaaaaaaaaaaaaa

SEQ ID NO: 43262 - RNA, 1551 nt, Artificial Sequence
  mRNA product Design i-3 (A100) comprising derived and/or modified sequence from LASV(G502-SLE-2009;Clade IV)__AIT17126__GPCmut13 (opt4)
aggagaaagcuuaccaugggccagaucgugaccuucuuccaggaggugccccacgugaucgaggaggugaugaacaucgugcugaucgcccugagcauccuggccgugcugaagggccuguacaacuucgccaccugcggccuggugggccugcugaccuuccugcugcugugcggcagaagcugcaccaccggccuguacaagggcguguacgagcugcagacccuggagcugaacauggagacccugaacaugaccaugccccugagcugcaccaagaacaacagccaccacuacaucauggugggcaacgagaccggccuggagcugacccugaccaacaccagcaucaucaaccacaaguucugcaaccugagcgacgcccacaagaagaaccuguacgaccacgcccugaugagcaucaucagcaccuuccaccugagcauccccaacuucaaccaguacgaggccaugagcugcgacuucaacggcggcaagaucagcgugcaguacaaccugagccacagcuacgccggcgacgccgccgaccacugcggcaccguggccaacggcgugcugcagaccuucaugagaauggccuggggcggcagcuacaucgcccuggacagcggcagaggcagaugggacugcaucaugaccagcuaccaguaccugaucauccagaacaccaccugggaggaccacugccaguucagcagacccagccccaucggcuaccugggccugcugagccagagaaccagagacaucuacaucagcagaagacugcugggcaccuucaccuggacccugagcgacagcgagggcaaggacacccccggcggcuacugccugaccagauggaugcugaucgaggccgagcugaagugcuucggcaacaccgccguggccaagugcaacgagaagcacgacgaggaguucugcgacaugcugagacuguucgacuucaacaagcaggccauccagagacugaaggccgaggcccagaugagcauccagcugaucaacaaggccgugaacgcccugaucaacgaccagcuggugaugaagaaccaccugagagacaucaugggcauccccuacugcaacuacagcagauacugguaccugaaccacaccaccaccggcagaaccagccugcccaagugcuggcuggugagcaacggcagcuaccugaacgagacccacuucagcgacgacaucgagcagcaggccgacaacaugaucaccgagaugcugcagaaggaguacauggagagacagggcaagaccccccugggccugguggaccuguucguguucagcaccagcuucuaccugaucagcaucuuccugcaccuggugaagauccccugaggacuaguuauaagacugacuagcccgaugggccucccaacgggcccuccuccccuccuugcaccgagauuaauaaaaaaaaaaaaaaaaaaaaaaaaaaaaaaaaaaaaaaaaaaaaaaaaaaaaaaaaaaaaaaaaaaaaaaaaaaaaaaaaaaaaaaaaaaaaaaaaaaaa

SEQ ID NO: 43263 - RNA, 1551 nt, Artificial Sequence
  mRNA product Design i-3 (A100) comprising derived and/or modified sequence from LASV(G733-SLE-2010;Clade IV)__AIT17154__GPCmut13 (opt4)
aggagaaagcuuaccaugggccagaucgugaccuucuuccaggaggugccccacgugaucgaggaggugaugaacaucgugcugaucgcccugagcauccuggccgugcugaagggccuguacaacuucgccaccugcggcaucgugggccuggugagcuuccugcugcugugcggcagaagcugcaccaccagccuguacaagggcguguacgagcugcagacccuggagcugaacauggagacccugaacaugaccaugccccugagcugcaccaagaacaacagccaccacuacaucauggugggcaacgagaccggccuggagcugacccugaccaacaccagcaucaucaaccacaaguucugcaaccugagcgacgcccacaagaagaaccuguacgaccacgcccugaugagcaucaucagcaccuuccaccugagcauccccaacuucaaccaguacgaggccaugagcugcgacuucaacggcggcaagaucagcgugcaguacaaccugagccacagcuacgccggcgacgccgccaaccacugcggcaccaucgccaacggcgugcugcagaccuucaugagaauggccuggggcggcagcuacaucgcccuggacagcggcagagacagaugggacugcaucaugaccagcuaccaguaccugaucauccagaacaccaccugggaggaccacugccaguucagcagacccagccccaucggcuaccugggccugcugagccagagaaccagagacaucuacaucagcagaagacugcugggcaccuucaccuggacccugagcgacagcgagggcaaggacacccccggcggcuacugccugaccagauggaugcugaucgaggccgagcugaagugcuucggcaacaccgccguggccaagugcaacgagaagcacgacgaggaguucugcgacaugcugagacuguucgacuucaacaagcaggccauccagagacugaaggccgaggcccagaugagcauccagcugaucaacaaggccgugaacgcccugaucaacgaccagcugaucaugaagaaccaccugagagacaucaugggcauccccuacugcaacuacagcaaguacugguaccugaaccacaccaccaccggcaagaccagccugcccaagugcuggcuggugagcaacggcagcuaccugaacgagacccacuucagcgacgacaucgagcagcaggccgacaacaugaucaccgagaugcugcagaaggaguacauggagagacagggcaagaccccccugggccugguggaccuguucguguucagcaccagcuucuaccugaucagcaucuuccugcaccuggugaagauccccugaggacuaguuauaagacugacuagcccgaugggccucccaacgggcccuccuccccuccuugcaccgagauuaauaaaaaaaaaaaaaaaaaaaaaaaaaaaaaaaaaaaaaaaaaaaaaaaaaaaaaaaaaaaaaaaaaaaaaaaaaaaaaaaaaaaaaaaaaaaaaaaaaaaa

SEQ ID NO: 43264 - RNA, 1551 nt, Artificial Sequence
  mRNA product Design i-3 (A100) comprising derived and/or modified sequence from MOPV/LASV reassortant(IGS-1;Clade IV)__AFY05576__GPCmut13 (opt4)
aggagaaagcuuaccaugggccagaucgugaccuucuuccaggaggugccccacgugaucgaggaggugaugaacaucgugcugaucgcccugagcgugcuggccgugcugaagggccuguacaacuucgccaccugcggccuggugggccuggugaccuuccugcugcugugcggcagaagcugcaccaccagccuguacaagggcguguacgagcugcagacccuggagcugaacauggagacccugaacaugaccaugccccugagcugcaccaagaacaacagccaccacuacaucauggugggcaacgagaccggccuggagcugacccugaccaacaccagcaucaucaaccacaaguucugcaaccugagcgacgcccacaagaagaaccuguacgaccacgcccugaugagcaucaucagcaccuuccaccugagcauccccaacuucaaccaguacgaggccaugagcugcgacuucaacggcggcaagaucagcgugcaguacaaccugagccacagcuacgccggcgacgccgccaaccacugcggcaccguggccaacggcgugcugcagaccuucaugagaauggccuggggcggcagcuacaucgcccuggacagcggcagaggcaacugggacugcaucaugaccagcuaccaguaccugaucauccagaacaccaccugggaggaccacugccaguucagcagacccagccccaucggcuaccugggccugcugagccagagaaccagagacaucuacaucagcagaagacugcugggcaccuucaccuggacccugagcgacagcgagggcgaggacacccccggcggcuacugccugaccagauggaugcugaucgaggccgagcugaagugcuucggcaacaccgccguggccaagugcaacgagaagcacgacgaggaguucugcgacaugcugagacuguucgacuucaacaagcaggccauccagagacugaaggccgaggcccagaugagcauccagcugaucaacaaggccgugaacgcccugaucaacgaccagcugaucaugaagaaccaccugagagacaucaugggcauccccuacugcaacuacagcaaguacugguaccugaaccacaccaccaccggcagaaccagccugcccaagugcuggcuggugagcaacggcagcuaccugaacgagacccacuucagcgacgacaucgagcagcaggccgacaacaugaucaccgagaugcugcagaaggaguacauggagagacagggcaagaccccccugggccugguggaccuguucguguucagcaccagcuucuaccugaucagcaucuuccugcaccuggugaagauccccugaggacuaguuauaagacugacuagcccgaugggccucccaacgggcccuccuccccuccuugcaccgagauuaauaaaaaaaaaaaaaaaaaaaaaaaaaaaaaaaaaaaaaaaaaaaaaaaaaaaaaaaaaaaaaaaaaaaaaaaaaaaaaaaaaaaaaaaaaaaaaaaaaaaa

SEQ ID NO: 43265 - RNA, 1551 nt, Artificial Sequence
  mRNA product Design i-3 (A100) comprising derived and/or modified sequence from LASV(LM765-SLE-2012;Clade IV)__AIT17814__GPCmut13 (opt4)
aggagaaagcuuaccaugggccagaucgugaccuucuuccaggaggugccccacgugaucgaggaggugaugaacaucgugcugaucgcccugagcauccuggccgugcugaagggccuguacaacuucgccaccugcggccuggugggccuggugaccuuccugcugcugugcggcagaagcugcaccaccagccuguacaagggcguguacgagcugcagacccuggagcugaacauggagacccugaacaugaccaugccccugagcugcaccaagaacaacagccaccacuacaucauggugggcaacgagaccggccuggagcugacccugaccaacaccagcaucaucgaccacaaguucugcaaccugagcgacgcccacagaaagaaccuguacgaccacgcccugaugagcaucaucagcaccuuccaccugagcauccccaacuucaaccaguacgaggccaugagcugcgacuucaacggcggcaagaucagcgugcaguacaaccugagccacagcuacgccaaggacgccgccgaccacugcggcaccguggccaacggcgugcugcagaccuucaugagaauggccuggggcggcagcuacaucgcccuggacagcggcagaggcagaugggacugcaucaugaccagcuaccaguaccugaucauccagaacaccaccugggaggaccacugccaguucagcagacccagccccaucggcuaccugggccugcugagccagagaaccagagacaucuacaucagcagaagacugcugggcaccuucaccuggacccugagcgacagcgagggcaaggacacccccggcggcuacugccugaccagauggaugcugaucgaggccgagcugaagugcuucggcaacaccgccguggccaagugcaacgagaagcacgacgaggaguucugcgacaugcugagacuguucgacuucaacaagcaggccauccagagacugaaggccgaggcccagaugagcauccagcugaucaacaaggccgugaacgcccugaucaacgaccagcugaucaugaagaaccaccugagagacaucaugggcauccccuacugcaacuacagcaaguacugguaccugaaccacaccaccaccggcaagaccagccugcccaagugcuggcuggugagcaacggcagcuaccugaacgagacccacuucagcgacgacaucgagcagcaggccgacaacaugaucaccgagaugcugcagaaggaguacauggagagacagggcaagaccccccugggccugguggaccuguucguguucagcaccagcuucuaccugaucagcaucuuccugcaccuggugaagauccccugaggacuaguuauaagacugacuagcccgaugggccucccaacgggcccuccuccccuccuugcaccgagauuaauaaaaaaaaaaaaaaaaaaaaaaaaaaaaaaaaaaaaaaaaaaaaaaaaaaaaaaaaaaaaaaaaaaaaaaaaaaaaaaaaaaaaaaaaaaaaaaaaaaaa

SEQ ID NO: 43266 - RNA, 1551 nt, Artificial Sequence
  mRNA product Design i-3 (A100) comprising derived and/or modified sequence from LASV(LM776-SLE-2012;Clade IV)__AIT17824__GPCmut13 (opt4)
aggagaaagcuuaccaugggccagaucgugaccuucuuccaggaggugccccacgugaucgaggaggugaugaacaucgugcugaucgcccugagcauccuggccgugcugaagggccuguacaacuucgccaccugcggccuggugggccuggugaccuuccugcugcugugcggcagaagcugcaccaccagcguguacaagggcguguacgagcugcagacccuggagcugaacauggagacccugaacaugaccaugccccugagcugcaccaagaacaacagccaccacuacaucauggugggcaacgagaccggccuggagcugacccugaccaacaccagcaucaucaaccacaaguucugcaaccugagcgacgcccacaagaagaaccuguacgaccacgcccugaugagcaucaucagcaccuuccaccugagcauccccaacuucaaccaguacgaggccaugagcugcgacuucaacggcggcaagaucagcgugcaguacaaccugagccacagcuacgccggcgacgccgccaaccacugcggcaccguggccaacggcgugcugcagaccuucaugagaauggccuggggcggcagcuacaucgcccuggacagcggccacggcaagugggacugcaucaugaccagcuaccaguaccugaucauccagaacaccaccugggaggaccacugccaguucagcagacccagccccaucggcuaccugggccugcugagccagagaaccagagacaucuacaucagcagaagacugcugggcaccuucaccuggacccugagcgacagcgagggcaaggacacccccggcggcuacugccugaccagauggaugcugaucgaggccgagcugaagugcuucggcaacaccgccguggccaagugcaacgagaagcacgacgaggaguucugcgacaugcugagacuguucgacuucaacaagcaggccauccagagacugaaggccgaggcccagaugagcauccagcugaucaacaaggccgugaacgcccugaucaacgaccagcugaucaugaagaaccaccugagagacaucaugggcauccccuacugcaacuacagcaaguacugguaccugaaccacaccaccaccggcaagaccagccugcccaagugcuggcuggugagcaacggcagcuaccugaacgagacccacuucagcgacgacaucgagcagcaggccgacaacaugaucaccgagaugcugcagaaggaguacauggagagacagggcaagaccccccugggccugguggaccuguucguguucagcaccagcuucuaccugaucagcaucuuccugcaccuggugaagauccccugaggacuaguuauaagacugacuagcccgaugggccucccaacgggcccuccuccccuccuugcaccgagauuaauaaaaaaaaaaaaaaaaaaaaaaaaaaaaaaaaaaaaaaaaaaaaaaaaaaaaaaaaaaaaaaaaaaaaaaaaaaaaaaaaaaaaaaaaaaaaaaaaaaaa

SEQ ID NO: 43267 - RNA, 1551 nt, Artificial Sequence
  mRNA product Design i-3 (A100) comprising derived and/or modified sequence from LASV(Mad39;Clade IV)__ANH09722__GPCmut13 (opt4)
aggagaaagcuuaccaugggccagaucgugaccuucuuccaggaggugccccacgugaucgaggaggugaugaacaucgugcugaucgcccugagcauccuggccgugcugaagggccuguacaacguggccaccugcggccugaucggccuggugaccuuccugcugcugugcggcagaagcugcaccaccacccuguacaagggcguguacgagcugcaggcccuggagcugaacauggagacccugaacaugaccaugccccugagcugcaccaagaacaacagccaccacuacaucagagugggcaacgagaccggccuggagcugacccugaccaacaccagccugaucaaccacaaguucugcaaccugagcgacgcccacaagaagaaccuguacgaccacgcccugaugagcaucaucagcaccuuccaccugagcauccccaacuucaaccaguacgaggccaugagcugcgacuucaacgacggcaagaucagcgugcaguacaaccugagccacaccuacgccggcgacaccgccaaccacugcggcaccguggccaacggcgugcugcagaccuucaugagaauggccuggggcggcagcuacaucgcccuggacagcggcagaggcggcugggacugcaucaugaccagcuaccaguaccugaucauccagaacaccaccugggaggaccacugccaguucagcagacccagccccaucggcuaccugggccugcugagccagagaaccagagacaucuacaucagcagaagacugcugggcaccuucaccuggacccugagcgacagcgagggcaaggacacccccggcggcuacugccugaccagauggaugcugaucgaggccgagcugaagugcuucggcaacaccgccguggccaagugcaacgagaagcacgacgaggaguucugcgacaugcugagacuguucgacuucaacaagcaggccauccagagacugaaggccgaggcccagaugagcauccagcugaucaacaaggccgugaacgcccugaucaacgaccagcugaucaugaagaaccaccugagagacaucaugggcauccccuacugcaacuacagcaaguacugguaccugaaccacaccgugaccggcaagaccagccugcccaagugcuggcuggugagcaacggcagcuaccugaacgagacccacuucagcgacgacaucgagcagcaggccgacaacaugaucaccgagaugcugcagaaggaguacauggagagacagggcaagaccccccugggccugguggaccuguucguguucagcaccagcuucuaccugaucagcaucuuccugcaccuggugaagauccccugaggacuaguuauaagacugacuagcccgaugggccucccaacgggcccuccuccccuccuugcaccgagauuaauaaaaaaaaaaaaaaaaaaaaaaaaaaaaaaaaaaaaaaaaaaaaaaaaaaaaaaaaaaaaaaaaaaaaaaaaaaaaaaaaaaaaaaaaaaaaaaaaaaaa

SEQ ID NO: 43268 - RNA, 1551 nt, Artificial Sequence
  mRNA product Design i-3 (A100) comprising derived and/or modified sequence from LASV(Z0947-SLE-2011;Clade IV)__AIT17840__GPCmut13 (opt4)
aggagaaagcuuaccaugggccagaucgugaccuucuuccaggaggugccccacgugaucgaggaggugaugaacaucgugcugaucgcccugagcauccuggccgugcugaagggccuguacaacuucgccaccugcggccuggugggccuggugaccuuccugcugcugugcggcagaagcugcaccaucagccuguacaagggcguguacgagcugcagacccuggagcugaacauggagacccugaacaugaccaugccccugagcugcaccaagaacaacagccaccacuacaucauggugggcaacgagaccggccuggagcugacccugaccaacaccagcaucaucaaccacaaguucugcaaccugagcgacgcccacaagaagaaccuguacgaccacgcccugaugagcaucaucagcaccuuccaccugagcauccccaacuucaaccaguacgaggccaugagcugcgacuucaacggcggcaagaucagcgugcaguacaaccugagccacagcuacgccggcgacgccgccaaccacugcggcaccguggccaacggcgugcugcagaccuucaugagaauggccuggggcggcagcuacaucgcccuggacagcggcagagacagaugggacugcaucaugaccagcuaccaguaccugaucauccagaacaccaccugggaggaccacugccaguucagcagacccagccccaucggcuaccugggccugcugagccagagaaccagagacaucuacaucagcagaagacugcugggcaccuucaccuggacccugagcgacagcgagggcaaggacacccccggcggcuacugccugaccagauggaugcugaucgaggccgagcugaagugcuucggcaacaccgccguggccaagugcaacgagaagcacgacgaggaguucugcgacaugcugagacuguucgacuucaacaagcaggccauccagagacugaaggccgaggcccagaugagcauccagcugaucaacaaggccgugaacgcccugaucaacgaccagcugaucaugaagaaccaccugagagacaucaugggcauccccuacugcaacuacagcaaguacugguaccugaaccacaccaccaccggcaagaccagccugcccaagugcuggcuggugagcaacggcagcuaccugaacgagacccacuucagcgacgacaucgagcagcaggccgacaacaugaucaccgagaugcugcagaaggaguacauggagagacagggcaagaccccccugggccugguggaccuguucguguucagcaccagcuucuaccugaucagcaucuuccugcaccuggugaagauccccugaggacuaguuauaagacugacuagcccgaugggccucccaacgggcccuccuccccuccuugcaccgagauuaauaaaaaaaaaaaaaaaaaaaaaaaaaaaaaaaaaaaaaaaaaaaaaaaaaaaaaaaaaaaaaaaaaaaaaaaaaaaaaaaaaaaaaaaaaaaaaaaaaaaa

SEQ ID NO: 43269 - RNA, 1551 nt, Artificial Sequence
  mRNA product Design i-3 (A100) comprising derived and/or modified sequence from LASV(Josiah;Clade IV)__NP_694870__GPCmut13 (opt5)
aggagaaagcuuaccaugggccagaucgugaccuucuuucaagaggucccccacguuauugaagaggugaugaacaucgugcugauugcccucagcguccuggcugugcuuaaggggcuguacaauuucgccacaugcggacucguuggccuggugacguuucuucugcucugugggagauccugcaccacaucucuguauaaaggagucuacgaacugcagacccucgagcugaacauggaaacacuuaauaugaccaugccucugagcuguacaaagaacaauucccaucacuauaucauggugggcaacgagaccgggcucgagcugacgcuuaccaauacaucuauuaucaaccauaaauucugcaaucugagcgacgcgcacaagaaaaaccucuacgaucaugcucugauguccaucauuucuaccuuucaccugagcaucccgaauuucaaccaguaugaagccauguccugugacuuuaauggaggcaagauuagcguucaguacaaccucucucacuccuaugccggcgaugcugccaaucauugcgggacaguggcuaacggaguccugcaaaccuucaugcggauggccuggggcgggagcuacaucgcgcuugacucuggacgcggcaacugggauuguauuaugacguccuaccaguaucugaucauucagaauacaaccugggaggaccacugccaguuuagcagacccucuccuaucggguaccucggacugcuuucccaacggacacgcgauaucuauauuagcagacggcugcucggcaccuucaccuggacacuguccgacucugaaggcaaggauacgcccgggggauacugucugacccgcuggaugcucaucgaggccgagcugaaaugcuuuggcaacacagcuguggccaaguguaaugaaaaacaugacgaggaguucugcgauaugcuuagacuguuugacuucaacaagcaggcuauucagcggcucaaagccgaagcgcagaugagcauccaacugauuaauaaggccgugaacgcucuuaucaaugaucagcugaucaugaagaaccaccuccgcgacauuauggggaucccuuauugcaauuacuccaaauauugguaccugaaccacaccacaaccggaagaacgagccugcccaaguguuggcucgucucuaauggcuccuaccugaacgaaacacauuucagcgacgauauugagcagcaagccgacaauaugaucaccgagaugcuucagaaagaauauauggagcggcaggggaagaccccucugggacucguugaucuguuuguguucucuaccagcuuuuaccugauuuccaucuuccuucaccucgugaaaaucccgugaggacuaguuauaagacugacuagcccgaugggccucccaacgggcccuccuccccuccuugcaccgagauuaauaaaaaaaaaaaaaaaaaaaaaaaaaaaaaaaaaaaaaaaaaaaaaaaaaaaaaaaaaaaaaaaaaaaaaaaaaaaaaaaaaaaaaaaaaaaaaaaaaaaa

SEQ ID NO: 43270 - RNA, 1548 nt, Artificial Sequence
  mRNA product Design i-3 (A100) comprising derived and/or modified sequence from LASV(LP;Clade I)__AAF86701__GPCmut13 (opt5)
aggagaaagcuuaccaugggccagaucauuaccuucuuucaagaggugccccacgucaucgaagagguuaugaacauugugcugaucgcccucagccugcuugcuauucugaaggggcucuacaauaucgccacaugcggaaucauuggccugguggcguuccuuuuucugugugggaaauccugcucucucacgcugaagggaggcuaugaacugcagacccucgagcugaacauggaaacacuuaauaugaccaugccucugagcuguaccaaaaacuccucucaucacuacaucagagucgggaaugagacaggacucgagcugacacuuaccaacacgagcauuaucaaucauaaguucugcaaccuguccgacgcucacaaaaagaaucucuaugaucaugcccugaugucuauuaucagcaccuuucaccuguccauuccgaacuucaaucaguacgaagccaugagcugugacuuuaacggcggcaagaucucugugcaguauaaucucucccacagcuacgcuggggaugccgcugagcauugcggaacaguugccaacggcgugcugcaaaccuucaugcggauggcguggggagggcgcuauaucgcccuugacucuggcaaagggaauugggauuguauuaugacauccuaccaguaccugaucauucagaacaccacgugggaagaccacugccaguuuagcagacccucuccuaucggauaucucggccugcuuucccaacggacacgcgauauuuacaucagcagacggcugcucggcaccuucacauggacccuguccgacucugaggggaacgagacccccggaggcuauugucugacacgcuggaugcucaucgaagcugagcugaagugcuuugggaauacggccgucgcuaaauguaacgaaaagcaugaugaggaguucugcgacaugcuuagacuguuugauuucaauaaacaggccauucggcgccucaaggcggaagcccagaugagcauccagcugauuaacaaggcugugaaugcccuuaucaacgaccaacugauuaugaaaaaucaccucagagauaucaugggaaucccuuacugcaacuauuccaaguacugguaucugaaucacaccagcucuggccggacaucccugcccaaauguuggcucauuagcaacgggucuuaccugaaugagacccaguucagcgacgacaucgaacagcaagcugauaacaugauuacagagaugcuucagaaggaauacaucgagcgccagggaaaaaccccucugggccucguugacauuuuuaucuucuccacgucuuuuuaucugauuagcaucuuccugcaucuuaucaagauuccgugaggacuaguuauaagacugacuagcccgaugggccucccaacgggcccuccuccccuccuugcaccgagauuaauaaaaaaaaaaaaaaaaaaaaaaaaaaaaaaaaaaaaaaaaaaaaaaaaaaaaaaaaaaaaaaaaaaaaaaaaaaaaaaaaaaaaaaaaaaaaaaaaaaaa

SEQ ID NO: 43271 - RNA, 1548 nt, Artificial Sequence
  mRNA product Design i-3 (A100) comprising derived and/or modified sequence from LASV(803213;Clade II)__AAF86703__GPCmut13 (opt5)
aggagaaagcuuaccaugggccagaucauuaccuucuuucaagaggugccccacgucaucgaagagguuaugaacauugugcugaucgcccucagccugcuugcuauucugaaggggaucuacaauguggccacaugcggacucuucggccugaucuccuuucuucugcucugugggagaucuugcagcgucacguauaaaggaguguacgaacugcagacccuggagcucaacauggcgaaucugaacaugacaaugccucuuuccuguaccaagaauaacucucaucacuauauuaugguuggcaaugaaacagggcuggagcucacccugacaaacaccagcaucauuaaucauaaauucugcaaccuuuccgacgcucacaagaaaaaucuguacgaucaugcccucaugucuaucauuagcacguuucaccuguccaucccgaacuucaaucaguaugaggccaugagcugugacuuuaacggaggcaagauuucugugcaguacaaucugucccacagcuucgcugucgaugccgcuaaccauugcggcaccaucgccaacggggugcuccaaacauuuaugcggauggcguggggaggcucuuauaucgcccuggacuccgggaagggaaauugggauuguauuaugaccagcuaccaguaccuuaucauucagaacacaaccugggaagaccacugccaguucucucgccccuccccuaucggcuaucuggggcuccugagccaaagaacgcgggauauuuacaucucccgcagacuucugggaacauuuaccuggacacucucugacagcgagggcaaugaagcucccggcggguauugucugacccgguggaugcugaucgaggccgagcucaaaugcuucggaaacaccgcuguugccaaguguaaugaaaaacaugaugaggaauuuugcgacaugcugcgccuuuucgauuucaacaagcaggcgauuaaaagacugaagacagaggcccagauguccauccagcucauuaauaaggcugugaacgcccugaucaaugaccaacuuauuaugaaaaaccaucugcgggauaucaugggcaucccuuacugcaauuauagccgcuacugguaucucaaccacacggucaccgggaagacaucucugcccagauguuggcugguguccaauggaagcuaccucaacgaaacccacuuuucugacgacauugagcagcaggcugauaauaugaucacagagaugcugcaaaaagaauacauggaccggcagggcaagaccccucuugggcugguggaucucuucgucuuuagcacguccuucuaucugauuucuaucuuucugcaccuuguuaaaauuccgugaggacuaguuauaagacugacuagcccgaugggccucccaacgggcccuccuccccuccuugcaccgagauuaauaaaaaaaaaaaaaaaaaaaaaaaaaaaaaaaaaaaaaaaaaaaaaaaaaaaaaaaaaaaaaaaaaaaaaaaaaaaaaaaaaaaaaaaaaaaaaaaaaaaa

SEQ ID NO: 43272 - RNA, 1548 nt, Artificial Sequence
  mRNA product Design i-3 (A100) comprising derived and/or modified sequence from LASV(GA391;Clade III)__CAA36645__GPCmut13 (opt5)
aggagaaagcuuaccaugggccagaucgugaccuucuuucaagaggucccccacguuauugaagaggugaugaacaucgugcugauugcccucagcauccuggcuauucuuaaggggcuguacaaugucgccacaugcggacucaucggccuggugacguuccuucugcucuccgggagaucuuguagccugaucuauaaaggaaccuacgaacugcagacacucgagcugaacauggaaacccuuaauaugacaaugccucuguccugcaccaagaacaauucucaucacuauauucggguuggcaacgagacagggcucgagcugacccuuacgaauaccagcauccugaaccauaaauuuuguaaucucuccgacgcgcacaagcgcaaccuguacgaucauucucugaugagcauuaucuccacauuccaccucagcauuccgaauuuuaaccaguaugaagcuaugucuugcgacuucaauggaggcaaaaucaccgugcaguacaaccugucccacagcuuugccgucgaugccgcuggccauugugggacacuugccaauggagugcugcaaaccuucaugagaauggcuuggggcgggucuuauauugcccucgacuccggacggggcaacugggauugcaucaugacgagcuaccaguaccugaucauucagaacacaaccugggacgaucacugucaguuuucucgccccuccccuaucggguaucuuggacugcucagccaaagaacacgggacauuuacaucucccgcagacugcugggcaccuucaccuggacacucucugauagcgagggcaaugaaacgcccgggggauauugccugacccgguggaugcuuauugaggcggagcugaaguguuuuggcaacacagccguugcuaagugcaaugaaaaacaugacgaggaguucugugauaugcuccgccuguuugacuucaacaagcaggccaucagacggcuuaaaaccgaagcucagauguccauccagcugauuaauaaggccgugaacgcgcucaucaaugaucaacugauuaugaaaaaccaucugcgcgacaucauggggauuccuuacugcaauuauagcagauacugguaucucaaccacacaucuaccggaaagacgucccugccccggugcuggcuuaucagcaauggcucuuaccugaacgaaacaaaguucagcgacgauaucgagcagcaggccgacaauaugauuaccgagaugcuccaaaaagaauacaucgaucgccaggggaagaccccucugggacuggucgaccuuuuuguguucuccacaucuuuuuaucucauuagcaucuuccugcaccuggugaaaauuccgugaggacuaguuauaagacugacuagcccgaugggccucccaacgggcccuccuccccuccuugcaccgagauuaauaaaaaaaaaaaaaaaaaaaaaaaaaaaaaaaaaaaaaaaaaaaaaaaaaaaaaaaaaaaaaaaaaaaaaaaaaaaaaaaaaaaaaaaaaaaaaaaaaaaa

SEQ ID NO: 43273 - RNA, 1551 nt, Artificial Sequence
  mRNA product Design i-3 (A100) comprising derived and/or modified sequence from LASV(AV;Clade V)__CCA30314__GPCmut13 (opt5)
aggagaaagcuuaccaugggccagaucgugaccuucuuucaagaggucccccacguuauugaagaggugaugaacaucgugcugauugcccucagcauccuggcuguccuuaaggggcuguacaauauugccacaugcggacucaucggccugaucacguuccuucugcucugugggagauccugcucuagcaaccuguauaaaggaguguacgaacugcagucccucgaccugaauauggagacccuuaacaugacaaugccucugucuuguaccaagaauaacagccaucacuauauucggguuggcaaugauacagggcucgaacugacccuuacaaacaccuccauccugaaucauaaauuuugcaaccucucugacgcgcacaagaaagaucuguacgaccaugcucugaugagcauuaucuccacguuccaccucagcauuccgaauuuuaaccaguaugaggccaugucuugugauuucaauggaggcaagaucuccgugcaguacaaccugagccacucuuaugccauugacgcugccaaucauugcggcaccgucgcuaacgggauccuucaaacauuuaugcgcauggccuggggaggcuccuacaucgcgcuggauagcgggagaggaaacugggacuguauuaugaccucuuaccaguaucucaucauucagaauacaaccugggagaaccacugccaguucucccggcccagcccuaucggcuaccuggggcuucugucccaacgcacgagagauauuuauaucucucggcgccuccugggaacauuuaccuggacacugagcgacuccgaaggcaaugccacccccggcggguacugucucaccagauggaugcugaucgaggcugaacuuaagugcuucggaaacacagccguggcuaaauguaaugagaagcaugaugaggaauuuugcgacaugcugcgccucuucgauuuuaacaaacaggccauuagccggcugaagucugaggcgcagauguccauccagcuuauuaauaaagccguuaacgcucugaucaaugaccaacucauuaugaagaaccaccugagagacaucaugggcaucccuuauugcaauuacagcaaguauugguaccugaaccacacgauuaccgggaaaacaucucuccccaaguguuggcuggugagcaauggauccuaccuuaacgaaacccauuucucugaugacaucgagcagcaggccgauaauaugauuacagaaaugcugcaaaaagaguauauggagcggcagggcaagaccccucucgggcuggucgaccuguucguguuuagcacguccuucuaccuuaucagcauuuuucuccgccuggugaaaaucccgugaggacuaguuauaagacugacuagcccgaugggccucccaacgggcccuccuccccuccuugcaccgagauuaauaaaaaaaaaaaaaaaaaaaaaaaaaaaaaaaaaaaaaaaaaaaaaaaaaaaaaaaaaaaaaaaaaaaaaaaaaaaaaaaaaaaaaaaaaaaaaaaaaaaa

SEQ ID NO: 43274 - RNA, 1548 nt, Artificial Sequence
  mRNA product Design i-3 (A100) comprising derived and/or modified sequence from LASV(Togo/2016/7082;Clade VI)__AMR44577__GPCmut13 (opt5)
aggagaaagcuuaccaugggccagaucauuaccuucuuucaagaggugccccacgucaucgaagagguuaugaacauugugcugaucgcccucagccugcuugcuauucugaaggggguguacaaugucgccacaugcggaaucaucggccucgugacguuccuguuucuuugugggagauccugcucucugauuuauaaaggaagcuacgaacuccagacccuggagcugaacauggaaacacucaauaugaccaugccucuguccuguacaaagaacucuagccaucacuauauccggguuggcaaugagaccgggcuugagcugacacucaccaacacguccauuaucaaucauaaauucugcaaccugucugacgcgcacaagcgcaaucuuuacgaucaugcucugaugagcauucucuccaccuuucaccugagcaucccgaacuucaaucaguaugaagccaugucuugugacuuuaacggaggcaaaauuuccgugcaguacaaucugagccacgccuaugcugucgaugccgcugagcauugcggcacaguggccaacgggguucuccaaaccuucaugagaauggcguggggaggcucuuacaucgcccuggacuccgggcggggaaauugggauuguaucaugacaagcuaccaguaucuuauuauccagaacaccacgugggaagaccacugccaguuuucucgccccuccccuauuggcuaccuggggcuccugagccaaagaacacgggauaucuauauuucccgcagacuucugggaaccuucacauggacccucucugacagcgagggcaacgagacccccggcggguacugucugacacgguggaugcugaucgaagcugagcucaagugcuuuggaaauacggccguggcuaaguguaacgaaaaacaugaugaggaguucugcgacaugcugcgccuuuuugauuucaauaagcaggccauccagagacugaaauccgaagcgcagaugagcauucaacucaucaacaaggccgucaaugcucugauuaacgaccagcuuaucaugaaaaaucaucugcgggauaugaugggcauuccuuauugcaacuacucuaaguauugguaccucaaucacaccuccagcgggcgcacaucucugcccaaguguuggcuggugagcaacggauccuaccucaaugagacccacuucucugacgacaucgaacagcaagccgauaacaugaucacagagaugcugcagaaagaauauauugacagacagggcaagaccccucuugggcugguggaucucuuugucuucagcacguccuuuuaccugaucagcauuuuccugcaccuuaucaaaauuccgugaggacuaguuauaagacugacuagcccgaugggccucccaacgggcccuccuccccuccuugcaccgagauuaauaaaaaaaaaaaaaaaaaaaaaaaaaaaaaaaaaaaaaaaaaaaaaaaaaaaaaaaaaaaaaaaaaaaaaaaaaaaaaaaaaaaaaaaaaaaaaaaaaaaa

SEQ ID NO: 43275 - RNA, 1548 nt, Artificial Sequence
  mRNA product Design i-3 (A100) comprising derived and/or modified sequence from LASV(KAK-428;Clade n.d. (VII))__ANH09740__GPCmut13 (opt5)
aggagaaagcuuaccaugggccagaucgugaccuucuuucaagaggucccccacguuauugaagaggugaugaacaucgugcugauugcccucagccugcuugcuauccugaaggggcucuacaauuucgccacaugcggagucauuggccugaucacguuucuucugcucugugggagauccugcucugcgaccuauaaaggacaguacgaacugcagacacuggagcucaacauggaaagccugaauaugaccaugccucuuuccuguacaaagaacaauucucaucacuauauccgggcuggcaacaauaccgggcuggagcucacacugaccaacacgagcauuaucucccauaaauucugcaaucuuucugacgcccacaagaaaaaccuguacgaucauacccucaugagcauuaucacaaccuuucaccuguccauuccgaauuucaaccaguaugaggccaugagcugugacuuuaauggaggcaagaucucuauucaauacaaccugucccacagcuaugcuggcgaugccgcucagcauugcgggacaguggccaauggaguucuccagaccuucaugcgcauggcguggggcgggucuuaccuggcccuugacuccggaagacggggcugggauuguaucaucagcucuuaccaguaucugauuauccaaaacacgacaugggacgaucacugccaguuuucccgccccagcccuauuggguaccucggauucgugucccagaagaccagagacaucuauauuucucggcgccugcuuggcacauuuaccuggacccugagcgauuccgaaggccaugacaugcccgggggauacugucucacaagauggaugcugaucgaggcugaucugaaaugcuucggcaacacggccgucgcuaaguguaaugaaaaacacgacgaggaguuuugcgauauguggcgccucuucgacuucaacaagcaggccauccaacggcugaaagcggaagcccagaugaauauucagcuuaucaacaaggcugugaaugcccugauuaacgaccaacucaugaugaagaaucaccugagagauaucauggggauuccuuauugcaacuacagcaaauuuugguaucuuaauaacaccacaaccggacggacaucucugccccgcuguuggcucaucuccaauggcagcuaccugaacgagacccauuucucugacgauaucgaacagcaggcugacaauaugauuacggagaugcugcagaaggaauacauggauagacaagggaaaacaccucucggacugguugaccuuuuuguguucagcaccuccuuuuaucugaucaccauuuuccuccaccuggucaagaucccgugaggacuaguuauaagacugacuagcccgaugggccucccaacgggcccuccuccccuccuugcaccgagauuaauaaaaaaaaaaaaaaaaaaaaaaaaaaaaaaaaaaaaaaaaaaaaaaaaaaaaaaaaaaaaaaaaaaaaaaaaaaaaaaaaaaaaaaaaaaaaaaaaaaaa

SEQ ID NO: 43276 - RNA, 1548 nt, Artificial Sequence; identical to SEQ ID NO: 43270
  mRNA product Design i-3 (A100) comprising derived and/or modified sequence from LASV(Pinneo-NIG-1969;Clade I)__AIT17836__GPCmut13 (opt5)

SEQ ID NO: 43277 - RNA, 1548 nt, Artificial Sequence
  mRNA product Design i-3 (A100) comprising derived and/or modified sequence from LASV(ISTH0009-NIG-2011;Clade II)__AIT17404__GPCmut13 (opt5)
aggagaaagcuuaccaugggccagaucauuaccuucuuucaagaggugccccacgucaucgaagagguuaugaacauugugcugaucgcccucagccugcuugcuauucugaaggggaucuacaauguggccacaugcggacucuucggccuggucuccuuucuucugcucugugggagaucuugcagcacgaccuauaaaggaguguacgaacugcagacacuggagcucgacauggcgucccugaacaugaccaugccucuuucuuguacaaagaauaacagccaucacuauaucaugguuggcaaugaaaccgggcuggagcucacacugaccaacacguccauuaucaaucauaaauucugcaaccuuucugaugcucacaagaaaaaucuguacgaccaugcccucaugagcauuaucuccaccuuucaccugagcauuccgaacuucaaucaguaugaggccaugucuugugauuuuaacggaggcaagaucuccgugcaguacaaucugagccacgcuuaugccgucgacgcugccaaccauugcggcacaauugcgaauggggugcuccaaaccuucaugcggauggccuggggaggcucuuacaucgcucuggauuccgggaagggaagcugggacuguaucaugacaucuuaccaguaucuuauuauccagaacaccacgugggaagaucacugccaguuuucccgccccagcccuauuggcuaccuggggcuccugucccaaagaacacgggacaucuauauuucucgcagacuucugggaaccuucacauggacccucagcgauuccgagggcaacgaaacccccggcggguacugucugacacgguggaugcugaucgaggccgagcucaaaugcuuuggaaauacggcuguugccaaguguaacgaaaaacaugacgaggaguucugcgauaugcugcgccuuuuugacuucaauaagcaggcgaucagacggcugaaaaccgaagcccagaugagcauucagcucaucaacaaggcugugaaugcccugauuaacgaucaacuuaucaugaagaaucaucugcgcgacauuaugggcaucccuuauugcaacuacucuaaauauugguaccucaaucacacagucaccgggaagacaucccugcccagauguuggcuggugagcaacggaucuuaccucaaugaaacccacuucagcgacgauaucgagcagcaggcugacaacaugauuacggagcugcuucaaaaagaauauauggaucggcagggcaagacaccucuggggcucguggaccuguuugucuucuccaccucuuuuuaccugaucagcauuuuccuucaccucaucaaaauuccgugaggacuaguuauaagacugacuagcccgaugggccucccaacgggcccuccuccccuccuugcaccgagauuaauaaaaaaaaaaaaaaaaaaaaaaaaaaaaaaaaaaaaaaaaaaaaaaaaaaaaaaaaaaaaaaaaaaaaaaaaaaaaaaaaaaaaaaaaaaaaaaaaaaaa

SEQ ID NO: 43278 - RNA, 1548 nt, Artificial Sequence
  mRNA product Design i-3 (A100) comprising derived and/or modified sequence from LASV(ISTH2010-NIG-2012;Clade II)__AIT17482__GPCmut13 (opt5)
aggagaaagcuuaccaugggccagaucauuaccuucuuucaagaggugccccacgucaucgaagagguuaugaacauugugcugaucgcccucagccugcuugcuauucugaaggggaucuacaauguggccacaugcggacucuucggccuggucuccuuucuucugcucugugggagaucuugcagcacgaccuauaaaggaguguacgaacugcagacacuggagcucgacauggcgucccugaacaugaccaugccucuuucuuguacaaagaauaacagccaucacuauaucaugguuggcaaugaaaccgggcuggagcucacacugaccaacacguccauuaucaaucauaaauucugcaaccuuucugaugcucacaagaaaaaucuguacgaccaugcccucaugagcauuaucuccaccuuucaccugagcauuccgaacuucaaucaguaugaggccaugucuugugauuuuaacggaggcaagaucuccgugcaguacaaucugagccacgcuuaugccgucgacgcugccaaccauugcggcacaauugcgaauggggugcuccaaaccuucaugcggauggccuggggaggcucuuacaucgcucuggauuccgggaagggaagcugggacuguaucaugacaucuuaccaguaucuuauuauccagaacauuaccugggaagaucacugccaguuuucccgccccagcccuaucggcuaccuggggcuccugucccaaagaacgcgggacauuuauaucucucgcagacuucugggaacauucaccuggacacucagcgauuccgagggcaacgaaacccccggcggguacugucugacccgguggaugcugaucgaggccgagcucaaaugcuuuggaaauacagcuguugccaaguguaacgaaaaacaugacgaggaguucugcgauaugcugcgccuuuuugacuucaauaagcaggcgauuagacggcugaaaacggaagcccagaugagcauccagcucauuaacaaggcugugaaugcccugaucaacgaucaacuuauuaugaagaaucaucugcgcgacaucaugggcaucccuuauugcaacuacucuaaauauugguaccucaaucacaccgucacagggaagaccucccugcccagauguuggcuggugagcaacggaucuuaccucaaugaaacacacuucagcgacgauauugagcagcaggcugacaacaugaucaccgagcugcuucaaaaagaauauauugaucggcagggcaagacgccucuggggcucguggaccuguuugucuucuccacaucuuuuuaccugaucagcauuuuccuucaccucguuaaaaucccgugaggacuaguuauaagacugacuagcccgaugggccucccaacgggcccuccuccccuccuugcaccgagauuaauaaaaaaaaaaaaaaaaaaaaaaaaaaaaaaaaaaaaaaaaaaaaaaaaaaaaaaaaaaaaaaaaaaaaaaaaaaaaaaaaaaaaaaaaaaaaaaaaaaaa

SEQ ID NO: 43279 - RNA, 1548 nt, Artificial Sequence
  mRNA product Design i-3 (A100) comprising derived and/or modified sequence from LASV(Lassa virus/H.sapiens-wt/NGA/2015/ISTH_0543;Clade II)__AVO03639__GPCmut13 (opt5)
aggagaaagcuuaccaugggccagaucauuaccuucuuucaagaggugccccacgucaucgaagagguuaugaacauugugcugaucgcccucagccugcuugcuauucugaaggggaucuacaauguggccacaugcggacucuucggccuggucuccuuucuucugcucugugggagaucuugcagcacgaccuauaaaggaguguacgaacugcagacacuggagcucgacauggcgaaccugaauaugaccaugccucuuuccuguacaaagaacaauucucaucacuauaucaugguuggcaacgaaaccgggcuggagcucacacugaccaauacgagcauuaucaaccauaaauucugcaaucuuuccgaugcucacaagaaaaaccuguacgaccaugcccucaugucuauuaucagcaccuuucaccuguccauuccgaauuucaaccaguaugaggccaugagcugugauuuuaauggaggcaagaucucugugcaguacaaccugucccacacauaugcugucgacgccgcuaaucauugcggcaccauugccaacggggugcuccaaacauucaugcggauggcguggggaggcagcuacaucgcccuggauucugggaagggauccugggacuguaucaugaccagcuaccaguaucuuguuauucagaacacgacaugggaagaucacugccaguuuucucgccccuccccuaucggcuaccuggggcuccugagccaaagaacccgggacauuuauaucucccgcagacuucugggaacauucaccuggacccucucugauagcgagggcaaugaaacacccggcggguacugucugacgcgguggaugcugauugaggcugagcucaaaugcuuuggaaacaccgccguggcuaaguguaaugaaaaacaugacgaggaguucugcgauaugcugcgccuuuuugacuucaacaagcaggccaucagacggcugaaaacagaagcgcagauguccauccagcucauuaauaaggccgucaacgcucugaucaaugaucaacuuauuaugaagaaccaucugcgcgacaucaugggcauuccuuauugcaauuacagcaaauauugguaccucaaccacaccgugacagggaagaccucucugcccagauguuggcugguguccaauggaagcuaccucaacgaaacgcacuucucugacgauaucgagcagcaggccgacaauaugaucacagagcugcuucaaaaagaauauauugaucggcagggcaagaccccucuggggcucgucgaccuguuuguuuucagcaccuccuuuuaccugaucucuauuuuccuucaccucgugaaaaucccgugaggacuaguuauaagacugacuagcccgaugggccucccaacgggcccuccuccccuccuugcaccgagauuaauaaaaaaaaaaaaaaaaaaaaaaaaaaaaaaaaaaaaaaaaaaaaaaaaaaaaaaaaaaaaaaaaaaaaaaaaaaaaaaaaaaaaaaaaaaaaaaaaaaaa

SEQ ID NO: 43280 - RNA, 1548 nt, Artificial Sequence
  mRNA product Design i-3 (A100) comprising derived and/or modified sequence from LASV(Lassa virus/H.sapiens-wt/NGA/2016/ISTH_0009;Clade II)__AVO03571__GPCmut13 (opt5)
aggagaaagcuuaccaugggccagaucauuaccuucuuucaagaggugccccacgucaucgaagagguuaugaacauugugcugaucgcccucagccugcuugcuauucugaaggggaucuacaauguggccacaugcggacuccugggccuugucuccuuccugcuccugugugggagaucuugcagcacgaccuauaaaggaguguacgaacugcagacacucgagcuggacauggcgucccuuaacaugaccaugccucugucuuguacaaagaauaacagccaucacuauaucaugguuggcaaugaaaccgggcucgagcugacacuuaccaacacguccauuaucaaucauaaauuuugcaaccugucugaugcucacaagaaaaaucucuacgaccaugcccugaugagcauuaucuccaccuuccaccugagcauuccgaacuuuaaucaguaugaggccaugucuugugauuucaacggaggccggaucuccgugcaguacaaucucagccacucuuaugcugucgacgccgcuaaccauugcggcacaauugccaauggggugcugcaaaccuuuaugcgcauggcguggggaggcuccuacaucgcccuugauagcgggaagggaucuugggacuguaucaugacauccuaccaguaucugauuauccagaacaccacgugggaagaucacugccaguucagcagacccuccccuauuggcuaccucgggcugcuuucucaacggacacgcgacaucuauauuagcagacggcugcucggaaccuuuacauggacccuguccgauagcgagggcaacgaaacccccggcggguacugucugacacgcuggaugcucaucgaggcugagcugaagugcuucggaaauacggccguugcuaaauguaacgaaaagcaugacgaggaauuuugcgauaugcuuagacuguucgacuuuaauaaacaggccauccggcgccucaagaccgaggcgcagaugucuauucagcugaucaacaaagccgugaaugcucuuauuaacgaucaacugaucaugaagaaucaccucagagacauuaugggcaucccuuauugcaacuacuccaaguauugguaccugaaucacacagucaccgggaaaacaagccugccccgguguuggcucgugucuaacggaagcuaccugaaugaaacccauuucuccgacgauaucgagcagcaggccgacaacaugauuacggagcuucugcaaaaggaauauaucgaucgccagggcaaaacaccucucgggcugguggaccuguucgucuuuucuaccagcuucuaccuuauuuccaucuuucuccaccugguuaagauuccgugaggacuaguuauaagacugacuagcccgaugggccucccaacgggcccuccuccccuccuugcaccgagauuaauaaaaaaaaaaaaaaaaaaaaaaaaaaaaaaaaaaaaaaaaaaaaaaaaaaaaaaaaaaaaaaaaaaaaaaaaaaaaaaaaaaaaaaaaaaaaaaaaaaaa

SEQ ID NO: 43281 - RNA, 1548 nt, Artificial Sequence
  mRNA product Design i-3 (A100) comprising derived and/or modified sequence from LASV(Lassa virus/H.sapiens-wt/NGA/2016/ISTH_0017;Clade II)__AVO03567__GPCmut13 (opt5)
aggagaaagcuuaccaugggccagaucauuaccuucuuucaagaggugccccacgucaucgaagagguuaugaacauugugcugaucgcccucagccugcuugcuauucugaaggggaucuacaauguggccacaugcggacucuucggccuggucuccuuucuucugcucugugggagaucuugcagcacgaccuauaaaggaguguacgaacugcagacacuggagcucgacauggcgucccugaacaugaccaugccucuuucuuguacaaagaauaacagccaucacuauaucaugguuggcaaugaaaccgggcuggagcucacacugaccaacacguccauuaucaaucauaaauucugcaaccuuucugaugcucacaagaaaaaucuguacgaccaugcccucaugagcauuaucuccaccuuucaccugagcauuccgaacuucaaucaguaugaggccaugucuugugauuuuaacggaggcaagaucuccgugcaguacaaucugagccacacauaugcuauugacgccgcuaaccauugcggcaccaucgccaaugggguccuccaaacauucaugcggauggcguggggaggcucuuacaucgcccuggauuccgggaagggaagcugggacuguauuaugaccucuuaccaguaucuuaucauucagaacacgacaugggaagaucacugccaguuuucccgccccagcccuaucggcuaccuggggcuccugucccaaagaacccgggacauuuauaucucucgcagacuucugggaacauucaccuggacccucagcgauuccgagggcaacgaaacacccggcggguacugucugacgcgguggaugcugaucgaggcugagcucaaaugcuuuggaaauaccgccguggcuaaguguaacgaaaaacaugacgaggaguucugcgauaugcugcgccuuuuugacuucaauaagcaggccauuagacggcugaaaacagaagcgcagaugagcauccagcucauuaacaaggccguuaaugcucugaucaacgaucaacuuauuaugaagaaucaucugcgcgacaucaugggcaucccuuauugcaacuacucuaaauauugguaccucaaucacaccgugacagggaagaccucccugcccagauguuggcuggucagcaacggaucuuaccucaaugaaacgcacuucagcgacgauauugagcagcaggccgacaacaugaucacagagcugcuucaaaaagaauauauggaucggcagggcaagaccccucuggggcucguggaccuguuuguguucuccaccucuuuuuaccugauuagcaucuuccuucaccucguccgcauuccgugaggacuaguuauaagacugacuagcccgaugggccucccaacgggcccuccuccccuccuugcaccgagauuaauaaaaaaaaaaaaaaaaaaaaaaaaaaaaaaaaaaaaaaaaaaaaaaaaaaaaaaaaaaaaaaaaaaaaaaaaaaaaaaaaaaaaaaaaaaaaaaaaaaaa

SEQ ID NO: 43282 - RNA, 1548 nt, Artificial Sequence
  mRNA product Design i-3 (A100) comprising derived and/or modified sequence from LASV(Lassa virus/H.sapiens-wt/NGA/2018/ISTH_0959;Clade II)__AVV65099__GPCmut13 (opt5)
aggagaaagcuuaccaugggccagaucauuaccuucuuucaagaggugccccacgucaucgaagagguuaugaacauugugcugaucgcccucagccugcuugcuauucugaaggggaucuacaauguggucacaugcggacucuucggccugguguccuuucuucugcucugugggagaucuugcagcacgaccuauaaaggaguuuacgaacugcagacacuggagcucgacauggccucccugaacaugaccaugccucuuucuuguacaaagaauaacagccaucacuauaucauggugggcaaugaaaccgggcuggagcucacacugaccaacacguccauuaucaaucauaaauucugcaaccuuucugaugcgcacaagaaaaaucuguacgaccaugcucucaugagcauuaucuccaccuuucaccugagcauuccgaacuucaaucaguaugaggccaugucuugugauuuuaacggaggcaagaucuccguccaguacaaucugagccacgccuaugcuauugacgccgcuaaccauugcggcacaaucgccaauggggugcuccaaaccuucaugcggauggcguggggaggcucuuacaucgcccuggauuccgggaagggaagcugggacuguauuaugacaucuuaccaguaucuuaucauucagaacaccacgugggaagaucacugccaguuuucccgccccagcccuaucggcuaccuggggcuccugucccaaagaacacgggacauuuauaucucucgcagacuucugggaaccuucacauggacccucagcgauuccgagggcaacgaaacccccggcggguacugucugacacgguggaugcugaucgaggcugagcucaaaugcuuuggaaauacggccguugcuaaguguaacgaaaaacaugacgaggaguucugcgauaugcugcgccuuuuugacuucaauaagcaggccauuagacggcugaaaaccgaagcgcagaugagcauccagcucauuaacaaggccgugaaugcucugaucaacgaucaacuuauuaugaagaaucaucugcgcgacaucaugggcaucccuuauugcaacuacucuaaauauugguaccucaaucacacagucaccgggaagacaucccugcccagauguuggcuggugagcaacggaucuuaccucaaugaaacccacuucagcgacgauauugagcagcaggccgacaacaugaucacggagcugcuucaaaaagaauauauugaucggcagggcaagacaccucuggggcucguggaccuguuugucuucuccaccucuuuuuaccugaucagcauuuuccuucaccucguuaaaaucccgugaggacuaguuauaagacugacuagcccgaugggccucccaacgggcccuccuccccuccuugcaccgagauuaauaaaaaaaaaaaaaaaaaaaaaaaaaaaaaaaaaaaaaaaaaaaaaaaaaaaaaaaaaaaaaaaaaaaaaaaaaaaaaaaaaaaaaaaaaaaaaaaaaaaa

SEQ ID NO: 43283 - RNA, 1548 nt, Artificial Sequence
  mRNA product Design i-3 (A100) comprising derived and/or modified sequence from LASV(LASV003-NIG-2008;Clade II)__AIT17580__GPCmut13 (opt5)
aggagaaagcuuaccaugggccagaucauuaccuucuuucaagaggugccccacgucaucgaagagguuaugaacauugugcugaucgcccucagccugcuugcuauucugaaggggaucuacaauguggccacaugcggacucuucggccuggucuccuuucuucugcucugugggagaucuugcagcacgaccuauaaaggaguguacgaacugcagacacuggagcucgacauggcgucccugaacaugaccaugccucuuucuuguacaaagaauaacagccaucacuauaucaugguuggcaaugaaaccgggcuggagcucacacugaccaacacguccauuaucaaucauaaauucugcaaccuuucugaugcucacaagaaaaaucuguacgaccaugcccucaugagcauuaucuccaccuuucaccugagcauuccgaacuucaaucaguaugaggccaugucuugugauuuuaacggaggcaagaucuccgugcaguacaaucugagccacacauaugcugucgacgccgcuaaccauugcggcaccauugccaauggggugcuccaaacauucaugcggauggcguggggaggcucuuacaucgcccuggauuccgggaagggaagcugggacuguaucaugaccucuuaccaguaucuuauuauccagaacacgacaugggaagaucacugccaguuuucccgccccagcccuauuggcuaccuggggcuccugucccaaagaacccgggacaucuauauuucucgcagacuucugggaacauucaccuggacccucagcgauuccgagagcaacgaaacacccggcggcuacugucugacgcgguggaugcugaucgaggcugagcucaaaugcuuugggaauaccgccguugcuaaguguaacgaaaaacaugacgaggaguucugcgauaugcugcgccuuuuugacuucaauaagcaggccaucagacggcugaaagcggaagcccagaugucuauucagcucaucaacaaggcugugaaugcccugauuaacgaucaacuuaucaugaagaaucaucugcgcgacauuaugggaaucccuuauugcaacuacuccaaauauugguaccucaaucacacagucaccggcagaacaagccugccccgguguuggcuggugucuaacgggagcuaccucaaugaaacccacuucuccgacgauaucgagcagcaggcugacaacaugauuacggagcugcuucaaaaggaauauauggaucgccagggaaaaacaccucugggccucguggaccuguuugucuucucuaccagcuuuuaccugaucuccauuuuccuucaccucguuaagaucccgugaggacuaguuauaagacugacuagcccgaugggccucccaacgggcccuccuccccuccuugcaccgagauuaauaaaaaaaaaaaaaaaaaaaaaaaaaaaaaaaaaaaaaaaaaaaaaaaaaaaaaaaaaaaaaaaaaaaaaaaaaaaaaaaaaaaaaaaaaaaaaaaaaaaa

SEQ ID NO: 43284 - RNA, 1548 nt, Artificial Sequence
  mRNA product Design i-3 (A100) comprising derived and/or modified sequence from LASV(LASV035-NIG-2009;Clade II)__AIT17588__GPCmut13 (opt5)
aggagaaagcuuaccaugggccagaucauuaccuucuuucaagaggugccccacgucaucgaagagguuaugaacauugugcugaucgcccucagccugcuugcuauucugaaggggaucuacaauguggccacaugcggacucuucggccuggucuccuuucuucugcucugugggagaucuugcagcacgaccuauaaaggaguguacgaacugcagacacuggagcucgacauggcgucccugaacaugaccaugccucuuucuuguacaaagaauaacagccaucacuauaucaugguuggcaaugaaaccgggcuggagcucacacugaccaacacguccauuaucaaucauaaauucugcaaccuuucugaugcucacaagaaaaaucuguacgaccaugcccucaugagcauuaucuccaccuuucaccugagcauuccgaacuucaaucaguaugaggccaugucuugugauuuuaacggaggcaagaucuccgugcaguacaaucugagccacgcuuaugccgucgacgcugccaaccauugcggcacaauugcgaauggggugcuccaaaccuucaugcggauggccuggggaggcucuuacaucgcucuggauuccgggaagggaagcugggacuguaucaugacaucuuaccaguaucuuauuauccagaacaccacgugggaagaucacugccaguuuucccgccccagcccuauuggcuaccuggggcuccugucccaaagaacacgggacaucuauauuucucgcagacuucugggaaccuucacauggacccucagcgauuccgagggcaacgaaacccccggcggguacugucugacacgguggaugcugaucgaggccgagcucaaaugcuuuggaaauacggcuguugccaaguguaacgaaaaacaugacgaggaguucugcgauaugcugcgccuuuuugacuucaauaagcaggcgaucagacggcugaaagccgaagcucagaugagcauucagcucaucaacaaggccgugaaugcucugauuaacgaucaacuuaucaugaagaaucaucugcgcgacauuaugggcaucccuuauugcaacuacucuaaauauugguaccucaaucacaccgucacagggaagaccucccugcccagauguuggcuggugagcaacggaucuuaccucaaugaaacacacuucagcgacgauaucgagcagcaggccgacaacaugauuaccgagcugcuucaaaaagaauauaucgaucggcagggcaagacgccucuggggcucguggaccuguuugucuucuccacaucuuuuuaccugauuagcaucuuccuucaccucguuaaaauuccgugaggacuaguuauaagacugacuagcccgaugggccucccaacgggcccuccuccccuccuugcaccgagauuaauaaaaaaaaaaaaaaaaaaaaaaaaaaaaaaaaaaaaaaaaaaaaaaaaaaaaaaaaaaaaaaaaaaaaaaaaaaaaaaaaaaaaaaaaaaaaaaaaaaaa

SEQ ID NO: 43285 - RNA, 1548 nt, Artificial Sequence
  mRNA product Design i-3 (A100) comprising derived and/or modified sequence from LASV(LASV1000-NIG-2009;Clade II)__AIT17782__GPCmut13 (opt5)
aggagaaagcuuaccaugggccagaucauuaccuucuuucaagaggugccccacgucaucgaagagguuaugaacauugugcugaucgcccucagccugcuugcuauucugaaggggaucuacaauguggccacaugcggacucuucggccuggucuccuuucuucugcucugugggagaucuugcagcacgaccuauaaaggaguguacgaacugcagacacuggagcucgacauggcgucccugaacaugaccaugccucuuucuuguacaaagaauaacagccaucacuauaucaugguuggcaaugaaaccgggcuggagcucacacugaccaacacguccauuaucaaucauaaauucugcaaccuuucugaugcucacaagaaaaaucuguacgaccaugcccucaugagcauuaucuccaccuuucaccugagcauuccgaacuucaaucaguaugaggccaugucuugugauuuuaacggaggcaagaucuccgugcaguacaaucugagccacacauaugcugucgacgccgcuaaccauugcggcaccauugccaauggggugcuccaaacauucaugcggauggcguggggaggcucuuacaucgcccuggauuccgggaagggaagcugggacuguaucaugaccucuuaccaguaucuuauuauccagaacacgacaugggaagaucacugccaguuuucccgccccagcccuauuggcuaccuggggcuccugucccaaagaacccgggacaucuauauuucucgcagacuucugggaacauucaccuggacccucagcgauuccgagggcaacgaaacacccggcggguacugucugacgcgguggaugcugaucgaggcugagcucaaaugcuuuggaaauaccgccguugcuaaguguaacgaaaaacaugacgaggaguucugcgauaugcugcgccuuuuugacuucaauaagcaggccaucaaaagacugaagacagaagcgcagaugagcauucagcucaucaacaaggccgugaaugcucugauuaacgaucaacuuaucaugaaaaaucaucugcgggacauuaugggcaucccuuauugcaacuacucuaaguauugguaccucaaucacaccgucacagggaaaaccucccugccccgcuguuggcuggugagcaacggaucuuaccucaaugaaacgcacuucagcgacgauaucgagcagcaggccgacaacaugauuacagagcugcuucaaaaggaauauaucgauagacagggcaaaaccccucuggggcucguggaccuguuugucuucuccaccucuuuuuaccugauuagcaucuuccuucaccucguuaagauuccgugaggacuaguuauaagacugacuagcccgaugggccucccaacgggcccuccuccccuccuugcaccgagauuaauaaaaaaaaaaaaaaaaaaaaaaaaaaaaaaaaaaaaaaaaaaaaaaaaaaaaaaaaaaaaaaaaaaaaaaaaaaaaaaaaaaaaaaaaaaaaaaaaaaaa

SEQ ID NO: 43286 - RNA, 1548 nt, Artificial Sequence
  mRNA product Design i-3 (A100) comprising derived and/or modified sequence from LASV(LASV221-NIG-2010;Clade II)__AIT17624__GPCmut13 (opt5)
aggagaaagcuuaccaugggccagaucauuaccuucuuucaagaggugccccacgucaucgaagagguuaugaacauugugcugaucgcccucagccugcuugcuauucugaaggggaucuacaauguggccacaugcggacucuucggccuggucuccuuucuucugcucugugggagaucuugcagcacgaccuauaaaggaguguacgaacugcagacacuggagcucgacauggcgucccugaacaugaccaugccucuuucuuguacaaagaauaacagccaucacuauaucaugguuggcaaugaaaccgggcuggagcucacacugaccaacacguccauuaucaaucauaaauucugcaaccuuucugaugcucacaagaaaaaucuguacgaccaugcccucaugagcauuaucuccaccuuucaccugagcauuccgaacuucaaucaguaugaggccaugucuugugauuuuaacggaggcaagaucuccgugcaguacaaucugagccacacauaugcuauugacgccgcuaaccauugcggcaccaucgccaaugggguccuccaaacauucaugcggauggcguggggaggcucuuacaucgcccuggauuccgggaagggaagcugggacuguauuaugaccucuuaccaguaucuuaucauucagaacacgacaugggaagaucacugccaguuuucccgccccagcccuaucggcuaccuggggcuccugucccaaagaacccgggacauuuauaucucucgcagacuucugggaacauucaccuggacccucagcgauuccgagggcaacgaaacacccggcggguacugucugacgcgguggaugcugaucgaggcugagcucaaaugcuuuggaaauaccgccguggcuaaguguaacgaaaaacaugacgaggaguucugcgauaugcugcgccuuuuugacuucaauaagcaggccauuagacggcugaaaacagaagcgcagaugagcauccagcucauuaacaaggccguuaaugcucugaucaacgaucaacuuauuaugaagaaucaucugcgcgacaucaugggcaucccuuauugcaacuacucuaaauauugguaccucaaucacaccgugacagggaagaccucccugcccagauguuggcuggucagcaacggaucuuaccucaaugaaacgcacuucagcgacgauauugagcagcaggccgacaacaugaucacagagaugcugcaaaaagaauauauggaucggcagggcaagaccccucuugggcugguggaccucuuuguguucuccaccucuuuuuaccugauuagcaucuuccugcaccuugucaaaauuccgugaggacuaguuauaagacugacuagcccgaugggccucccaacgggcccuccuccccuccuugcaccgagauuaauaaaaaaaaaaaaaaaaaaaaaaaaaaaaaaaaaaaaaaaaaaaaaaaaaaaaaaaaaaaaaaaaaaaaaaaaaaaaaaaaaaaaaaaaaaaaaaaaaaaa

SEQ ID NO: 43287 - RNA, 1548 nt, Artificial Sequence
  mRNA product Design i-3 (A100) comprising derived and/or modified sequence from LASV(LASV237-NIG-2010;Clade II)__AIT17638__GPCmut13 (opt5)
aggagaaagcuuaccaugggccagaucauuaccuucuuucaagaggugccccacgucaucgaagagguuaugaacauugugcugaucgcccucagccugcuugcuauucugaaggggaucuacaauguggccacaugcggacucuucggccuggucuccuuucuucugcucugugggagaucuugcagcacgaccuauaaaggaguguacgaacugcagacacuggagcucgacauggcgucccugaacaugaccaugccucuuucuuguacaaagaauaacagccaucacuauaucaugguuggcaaugaaaccgggcuggagcucacacugaccaacacguccauuaucaaucauaaauucugcaaccuuucugaugcucacaagaaagaccuguacgaucaugcccucaugagcauuaucuccaccuuucaccugagcauuccgaauuucaaccaguaugaggccaugucuugugacuuuaauggaggcaagaucuccgugcaguacaaccugagccacacauaugcugucgaugccgcuaaucauugcggcaccauugccaacggggugcuccaaacauucaugcggauggcguggggaggcucuuacaucgcccuggacuccgggaagggaagcugggauuguaucaugaccucuuaccaguaucuuauuauccagaauacgacaugggaagaccacugccaguuuucccgccccagcccuauuggcuaccuggggcuccugucccaaagaacccgggauaucuauauuucucgcagacuucugggaacauucaccuggacccucagcgacuccgagggcaacgaaacacccggcggguacugucugacgcgguggaugcugaucgaggcugagcucaaaugcuuuggaaacaccgccguugcuaaguguaaugaaaaacaugaugaggaguucugcgacaugcugcgccuuuuugauuucaacaagcaggccaucagacggcugaaaacagaagcgcagaugagcauucagcucaucaauaaggccgugaacgcucugauuaaugaccaacuuaucaugaagaaccaucugcgcgacauuaugggcaucccuuauugcaauuacucuaaauauugguaccucaaccacaccgucacagggaagaccucccugcccagauguuggcuggugagcaauggaucuuaccucaacgaaacgcacuucagcgaugacaucgagcagcaggccgauaauaugauuacagagcugcuucaaaaagaauauauggaccggcagggcaagaccccucuggggcucguggaucuguuugucuucuccaccucuuuuuaccugaucagcauuuuccuucaccucaucaaaauuccgugaggacuaguuauaagacugacuagcccgaugggccucccaacgggcccuccuccccuccuugcaccgagauuaauaaaaaaaaaaaaaaaaaaaaaaaaaaaaaaaaaaaaaaaaaaaaaaaaaaaaaaaaaaaaaaaaaaaaaaaaaaaaaaaaaaaaaaaaaaaaaaaaaaaa

SEQ ID NO: 43288 - RNA, 1548 nt, Artificial Sequence
  mRNA product Design i-3 (A100) comprising derived and/or modified sequence from LASV(LASV253-NIG-2011;Clade II)__AIT17670__GPCmut13 (opt5)
aggagaaagcuuaccaugggccagaucauuaccuucuuucaagaggugccccacgucaucgaagagguuaugaacauugugcugaucgcccucagccugcuugcuauucugaaggggaucuacaauguggccacaugcggacucuucggccuggucuccuuucuucugcucugugggagaucuugcagcacgaccuauaaaggaguguacgaacugcagacacuggagcucgacauggcgucccugaacaugaccaugccucuuucuuguacaaagaauaacagccaucacuauaucaugguuggcaaugaaaccgggcuggagcucacacugaccaacacguccauuaucaaucauaaauucugcaaccuuucugaugcucacaagaaaaaucuguacgaccaugcccucaugagcauuaucuccaccuuucaccugagcauuccgaacuucaaucaguaugaggccaugucuugugauuuuaacggaggcaagaucuccgugcaguacaaucugagccacacauaugcugucgacgccgcuaaccauugcggcaccauugccaauggggugcuccaaacauucaugcggauggcguggggaggcucuuacaucgcccuggauuccgggaagggaagcugggacuguaucaugaccucuuaccaguaucuuauuauccagaacacgacaugggaagaucacugccaguuuucccgccccagcccuauuggcuaccuggggcuccugucccaaagaacccgggacaucuauauuucucgcagacuucugggaacauucaccuggacccucagcgauuccgagggcaacgaaacacccggcggguacugucugacgcgguggaugcugaucgaggcugagcucaaaugcuuuggaaauaccgccguugcuaaguguaacgaaaaacaugacgaggaguucugcgauaugcugcgccuuuuugacuucaauaagcaggccaucagacggcugaaagcggaagcccagaugagcauucagcucaucaacaaggcugugaaugcccugauuaacgaucaacuuaucaugaagaaucaucugcgcgacauuaugggcaucccuuauugcaacuacucuaaauauugguaccucaaucacacagucaccgggagaacaucccugccccgguguuggcuggugagcaacggaucuuaccucaaugaaacccacuucagcgacgauaucgagcagcaggcugacaacaugauuacggagcugcuucaaaaggaauauaucgaucgccagggcaaaacaccucuggggcucguggaccuguuugucuucuccaccucuuuuuaccugauuagcaucuuccuucaccucguuaagauuccgugaggacuaguuauaagacugacuagcccgaugggccucccaacgggcccuccuccccuccuugcaccgagauuaauaaaaaaaaaaaaaaaaaaaaaaaaaaaaaaaaaaaaaaaaaaaaaaaaaaaaaaaaaaaaaaaaaaaaaaaaaaaaaaaaaaaaaaaaaaaaaaaaaaaa

SEQ ID NO: 43289 - RNA, 1548 nt, Artificial Sequence
  mRNA product Design i-3 (A100) comprising derived and/or modified sequence from LASV(LASV254-NIG-2011;Clade II)__AIT17674__GPCmut13 (opt5)
aggagaaagcuuaccaugggccagaucauuaccuucuuucaagaggugccccacgucaucgaagagguuaugaacauugugcugaucgcccucagccugcuugcuauucugaaggggaucuacaauguggccacaugcggacucuucggccuggucuccuuucuucugcucugugggagaucuugcagcacgaccuauaaaggaguguacgaacugcagacacuggagcucgacaugaccaaccugaauaugacaaugccucuuuccuguaccaagaacaauucucaucacuauaucaugguuggcaacgaaacagggcuggagcucacccugacgaauaccagcauuaucaaccauaaauucugcaaucuuuccgaugcgcacaagaaaaaccuguacaaucaugcucucaugucuauuaucagcacauuucaccuguccauuccgaacuucaaucaguaugaggccaugagcugugacuuuaacggaggcaagaucucugugcaguacaaucugucccacagcuaugccgucgaugcugccaaccauugcggcaccauugcuaacggggugcuccaaacauucaugcggauggccuggggaggcucuuacaucgcgcuggacuccgggaagggaaauugggauuguaucaugaccagcuaccaguaucuuauuauccagaacacgacaugggaagaccacugccaguuuucucgccccuccccuauuggcuaccuggggcuccugagccaaagaacccgggauaucuauauuucccgcagacuucugggaacauucaccuggacccucucugacagcgagggcaaugaaacacccggcggguacugucugacgcgguggaugcugaucgaggccgagcucaaaugcuuuggaaacaccgcuguugccaaguguaaugaaaaacaugaugaggaguucugcgacaugcugcgccuuuuugauuucaacaagcaggcuaucagacggcugaaaacagaagcccaggcgaauauucagcucaucaacaaggccgugaaugcucugauuaacgaccaacuuaucaugaagaaucaucugcgcgauauuaugggcaucccuuauugcaacuacuccaaauauugguaccucaaucacaccgucacagggaagaccagccugcccagauguuggcuggugucuaacggauccuaccucaaugaaacgcacuucagcgacgacaucgagcagcaggccgauaacaugauuacagagcugcuucaaaaagaauauauggaccggcagggcaagaccccucuggggcucguggaucuguuugucuucucuaccagcuuuuaccugaucuccauuuuccuucaccucguuaaaaucccgugaggacuaguuauaagacugacuagcccgaugggccucccaacgggcccuccuccccuccuugcaccgagauuaauaaaaaaaaaaaaaaaaaaaaaaaaaaaaaaaaaaaaaaaaaaaaaaaaaaaaaaaaaaaaaaaaaaaaaaaaaaaaaaaaaaaaaaaaaaaaaaaaaaaa

SEQ ID NO: 43290 - RNA, 1548 nt, Artificial Sequence
  mRNA product Design i-3 (A100) comprising derived and/or modified sequence from LASV(Nig08-A19;Clade III)__ADU56618__GPCmut13 (opt5)
aggagaaagcuuaccaugggccagaucgugaccuucuuucaagaggucccccacguuauugaagaggugaugaacaucgugcugauugcccucagcauccuggcuauucuuaaggggcuguacaauaucgccacaugcggacucaucggccuggucacguuccuucugcucuccgggagaucuuguagcaugaccuauaaaggaguguacgaacugcagacacuggagcucaacaugaauacccugaacaugacaaugccucuuuccugcaccaagaauaacucucaucacuauauuaugguuggcaaugaaacagggcuggagcucacccugacgaacaccagccuucugcaucacaaauuuuguaaucucuccgacgcgcauaagaaaaaccuguacgaucacacacugaugucuaucauuagcaccuuccaccucuccaucccgaauuuuaaccaguaugaggcuaugagcugcgacuucaauggaggcaagauuacagugcaguacaaccugucucauuccuaugccaucgaugccgcuaaucacuguggcaccgucgccaacggggugcuucaaacguuuaugcggauggcuuggggaggcagcuacauugcccuggacucugggcgcggaaagugggauugcaucaugacauccuaccaguaucucaucauucagaacaccacaugggaagaccauugucaguucagcagacccucuccuaucggcuaccuggggcuucugucccaacggacccgcgauauuuauaucagcagacggcuccugggaaccuuuacauggacgcuguccgacucugagggcaaugaaacccccggcggguacugccucacacgcuggaugcugauugaggcggagcuuaaauguuucggaaacaccgccguugcuaagugcaaugaaaaacacgaugaggaauuuugugacaugcugagacucuucgauuuuaacaagcaggccauccggcgccugaaagcugaggcccagaugagcauccagcuuauuaauaaggcggugaacgcccugaucaaugaccaacucauuaugaagaaccaccugagagauaucaugggcauuccuuauugcaauuacuccaaauauugguaccugaaccauacaagcaccgggcggacgucucucccccgcugcuggcuggucuccaauggaagcuaccuuaacgaaacacacuucucugacgacaucgagcagcaggcugauaauaugaucaccgagaugcugcaaaaggaauaucucgacagacagggcaaaaccccucuggggcugguggaucuuuucguguuuagcacauccuucuaccucauuucuaucuuucugcaucuggucaagauuccgugaggacuaguuauaagacugacuagcccgaugggccucccaacgggcccuccuccccuccuugcaccgagauuaauaaaaaaaaaaaaaaaaaaaaaaaaaaaaaaaaaaaaaaaaaaaaaaaaaaaaaaaaaaaaaaaaaaaaaaaaaaaaaaaaaaaaaaaaaaaaaaaaaaaa

SEQ ID NO: 43291 - RNA, 1551 nt, Artificial Sequence
  mRNA product Design i-3 (A100) comprising derived and/or modified sequence from LASV(G1180-SLE-2010;Clade IV)__AIT17168__GPCmut13 (opt5)
aggagaaagcuuaccaugggccagaucgugaccuucuuucaagaggucccccacguuauugaagaggugaugaacaucgugcugauugcccucagcauccuggcuguccuuaaggggcuguacaauuucgccacaugcggacucgugggccugcuuacguuucugcuccugugugggagauccugcaccgcgucucgguauaaaggaguuuacgaacugcagacacucgagcugaacauggaaacccuuaauaugacaaugccucugagcuguaccaagaacaauucccaucacuauauuauggugggcaacgagacagggcucgagcugacccuuacgaauaccucuaucaucaaccauaaauucugcaaucugagcgacgcucacaagaaaaaccucuacgaucaugcccugauguccauuaucucuacauuucaccugagcauuccgaauuucaaccaguaugaagccauguccugugacuuuaauggaggcaagaucagcguccaguacaaccucucucacuccuaugcuggcgaugccgcuaaucauugcgggaccguggccaacggaguucugcaaacauucaugcgcauggcguggggcgggagcuacauugcccuugacucuggacacggcuccugggauuguaucaugaccagcuaccaguaucugauuauccagaacacgacaugggaggaccauugccaguuuucuagacccuccccuaucggguaccucggacugcuuagccaacggacccgcgauauuuauaucuccagacggcugcucggcacauucaccuggacccugucugacagcgaaggcaaggauacacccgggggauacugucugacgcgcuggaugcucauugaggcugagcugaaaugcuuuggcaauaccgccguggcuaaguguaacgaaaaacacgacgaggaguucugcgauaugcuuagacuguuugacuucaauaagcaggccauccagcggcucaaagcggaagcccagauguccauucaacugaucaacaaggcugucaaugcccuuaucaacgaucagcugauuaugaagaaucaccuccgcgacaucauggggauuccuuauugcaacuacagcaaauauugguaccugaaucauacaaccacaggaaagaccucucugcccaaauguuggcucguguccaacggcagcuaccugaaugaaacgcacuucucugacgauaucgagcagcaagcugacaacaugauuacagagaugcuucagaaggaauauauggagagacaggggaaaaccccucugggacucguggaucuguuugucuucagcaccuccuuuuaccugaucucuaucuuccuucaucucguuaagauuccgugaggacuaguuauaagacugacuagcccgaugggccucccaacgggcccuccuccccuccuugcaccgagauuaauaaaaaaaaaaaaaaaaaaaaaaaaaaaaaaaaaaaaaaaaaaaaaaaaaaaaaaaaaaaaaaaaaaaaaaaaaaaaaaaaaaaaaaaaaaaaaaaaaaaa

SEQ ID NO: 43292 - RNA, 1551 nt, Artificial Sequence
  mRNA product Design i-3 (A100) comprising derived and/or modified sequence from LASV(G1442-SLE-2011;Clade IV)__AIT17180__GPCmut13 (opt5)
aggagaaagcuuaccaugggccagaucgugaccuucuuucaagaggucccccacguuauugaagaggugaugaacaucgugcugauugcccucagcauccuggcuguccuuaaggggcuguacaauguggccacaugcggacucauuggccugguuacguuccuucugcucugugggagauccugcaccacaacccuguauaaaggaguguacgaacugcagacacucgagcugaacauggaaacccuuaauaugacaaugccucugucuuguaccaagaacaauagccaucacuauauccgggucggcaacgagacggggcucgagcugacccuuacaaauaccuccaucauuaaccauaaauuuugcaaucugucugacgcgcacaagaaaaaccucuacgaucaugcucugaugagcaucauuuccacauuccaccugucuaucccgaauuuuaaccaguaugaagccaugagcugugacuucaauggaggcaagauuuccgugcaguacaaccucagccacucuuaugccggcgaugcugccaaucauugcgggaccguugcuaacggagugcugcaaacguuuaugcgcauggccuggggcggguccuacaucgcgcuugacagcggaagaggcaacugggauuguauuaugacaucuuaccaguaucugaucauccagaauaccacaugggacgaucacugccaguucucccggcccagcccuauuggguaccucggacugcuuucucaacgcaccagagacgucuauaucucccggcgccugcucggcaccuuuacauggacgcugagcgauuccgagggcaaggacacccccgggggauacugucugacaagauggaugcucauugaagccgagcugaaaugcuucggcaacaccgcuguggccaaguguaaugagaaacaugaugaagaguuuugcgacaugcuucggcuguucgauuuuaacaagcaggcuauccagcgccucaaagccgaagcgcagaugucuauucaacugaucaauaaggccgugaacgcucuuaucaaugaccagcugauuaugaagaaccaccucagagacaucauggggauuccuuauugcaauuacagcaaauauugguaccugaacaauacagccaccggaaagacgucccugcccaaauguuggcucaucagcaacggcucuuaccugaaugagacacacuucuccgaugacauugaacaggaggcugauaacaugaucaccgagaugcuucaaaaggaauauauggagcggcaggggaaaaccccucugggacucgucgaccuguucguuuuuagcacaucuuucuaccugaucagcauuuuucuucaucucgugaagaucccgugaggacuaguuauaagacugacuagcccgaugggccucccaacgggcccuccuccccuccuugcaccgagauuaauaaaaaaaaaaaaaaaaaaaaaaaaaaaaaaaaaaaaaaaaaaaaaaaaaaaaaaaaaaaaaaaaaaaaaaaaaaaaaaaaaaaaaaaaaaaaaaaaaaaa

SEQ ID NO: 43293 - RNA, 1551 nt, Artificial Sequence
  mRNA product Design i-3 (A100) comprising derived and/or modified sequence from LASV(G3010-SLE-2013;Clade IV)__AIT17344__GPCmut13 (opt5)
aggagaaagcuuaccaugggccagaucgugaccuucuuucaagaggucccccacguuauugaagaggugaugaacaucgugcugauugcccucagcauccuggcuguccuuaaggggcuguacaauuucgccacaugcggacucgugggccugguuacguuucuucugcucugugggagauccugcaccacaucucuguauaaaggaguguacgaacugcagacccucgagcugaacauggaaacacuuaauaugaccaugccucugagcuguacaaagaacaauucccaucacuauauuauggucggcaacgagaccgggcucgagcugacgcuuaccaauacaucuaucaucaaccauaaauucugcaaucugagcgacgcgcacaagaaaaaccucuacaaucaugcucugauguccauuaucucuaccuuucaccugagcauuccgaacuucaaucaguaugaagccauguccugugauuuuaacggaggcaagaucagcgugcaguacaaucucucucacuccuaugccggcgacgcugccagccauugcgggacaguugcuaacggagugcugcaaaccuucaugcggauggccuggggcgggucuuacauugcgcuugauuccggauacggcaagugggacuguaucaugacgagcuaucaguaccugauuauccagaacacaaccugggaggaucacugccaguuuucucgccccuccccuaucggguaucucggacugcuuagccaaagaacacgggacauuuacaucucccgcagacugcucggcaccuucaccuggacacugucugauagcgaaggcaaagacacgcccgggggauauugucugacccgguggaugcucauugaggccgagcugaagugcuuuggcaauacagcugucgccaaauguaacgaaaagcaugaugaggaguucugcgacaugcuucgccuguuugauuucaauaaacaggcuauccagagacucaagaccgaagcccagauguccauucaacugaucaacaaggcggugaaugcccuuaucaacgaccagcugauuaugaaaaaucaccuccgggauaucauggggauuccuuacugcaacuauagcaaguacugguaccugaaucacacaaccacgggaaaaacaucucugcccaaguguuggcucguguccaacggcagcuaucugaaugaaacccauuucucugacgacaucgagcagcaagcugauaacaugauuaccgagaugcuucagaaagaauacauggagcgccaggggaagacaccucugggacucgucgaccuguuuguuuucagcaccuccuuuuaucugaucucuaucuuccuucaccucgugaaaauuccgugaggacuaguuauaagacugacuagcccgaugggccucccaacgggcccuccuccccuccuugcaccgagauuaauaaaaaaaaaaaaaaaaaaaaaaaaaaaaaaaaaaaaaaaaaaaaaaaaaaaaaaaaaaaaaaaaaaaaaaaaaaaaaaaaaaaaaaaaaaaaaaaaaaaa

SEQ ID NO: 43294 - RNA, 1551 nt, Artificial Sequence
  mRNA product Design i-3 (A100) comprising derived and/or modified sequence from LASV(G502-SLE-2009;Clade IV)__AIT17126__GPCmut13 (opt5)
aggagaaagcuuaccaugggccagaucgugaccuucuuucaagaggucccccacguuauugaagaggugaugaacaucgugcugauugcccucagcauccuggcuguccuuaaggggcuguacaauuucgccacaugcggacucgugggccugcuuacguuucugcuccugugugggagauccugcaccacaggacuguauaaaggcguuuacgaacuccagacccuggagcuuaacauggaaacacugaauaugaccaugccucucucuuguacaaagaacaauagccaucacuauauuaugguggggaacgagaccggacuggagcuuacgcugaccaauacauccaucaucaaccauaaauucugcaaucucucugacgcgcacaagaaaaaccuguacgaucaugcucugaugagcauuaucuccaccuuucaccucucuauuccgaauuucaaccaguaugaagccaugagcugugacuuuaauggcggcaagaucuccguccaguacaaccugagccacucuuaugccggggaugcugccgaccauugcggaacaguggcuaauggcguucuucaaaccuucaugcggauggccuggggaggguccuacauugcgcuggauagcggccgcgggagaugggacuguaucaugacgucuuaccaguaucucauuauccagaacacaaccugggaggaucacugccaguuuucccggcccagcccuaucggauaccugggccuucugucucaacgcacaagagacauuuauaucucccggcgccuccugggcaccuucaccuggacacugagcgauuccgaagggaaggacacgcccggaggcuacugucucaccagauggaugcugauugaggccgagcuuaaaugcuuugggaacacagcuguggccaaguguaaugaaaaacaugaugaggaguucugcgacaugcugcggcucuuugauuucaacaagcaggcuauccagcgccugaaagccgaagcgcagaugucuauucaacuuaucaauaaggccgucaacgcucugaucaaugaccagcucgugaugaagaaccaccugagagacauuaugggaaucccuuauugcaauuacagccgguauugguaccugaaccacaccacaaccggccgcacgucccuccccaaauguuggcuggugagcaaugggucuuaccuuaacgaaacacauuucuccgaugacauugagcagcaagccgauaauaugaucaccgagaugcugcagaaggaauauauggagagacagggaaaaaccccucucggccuggucgaccuguuuguuuucagcacaucuuuuuaccuuauuagcaucuuccuccaccuggugaagaucccgugaggacuaguuauaagacugacuagcccgaugggccucccaacgggcccuccuccccuccuugcaccgagauuaauaaaaaaaaaaaaaaaaaaaaaaaaaaaaaaaaaaaaaaaaaaaaaaaaaaaaaaaaaaaaaaaaaaaaaaaaaaaaaaaaaaaaaaaaaaaaaaaaaaaa

SEQ ID NO: 43295 - RNA, 1551 nt, Artificial Sequence
  mRNA product Design i-3 (A100) comprising derived and/or modified sequence from LASV(G733-SLE-2010;Clade IV)__AIT17154__GPCmut13 (opt5)
aggagaaagcuuaccaugggccagaucgugaccuucuuucaagaggucccccacguuauugaagaggugaugaacaucgugcugauugcccucagcauccuggcuguccuuaaggggcuguacaauuucgccacaugcggaauugugggccucguuuccuuucugcuucugugugggagaucuugcacgaccagccucuauaaaggaguguacgaacugcagacacuggagcucaacauggaaacccugaauaugacaaugccucuuuccuguaccaagaacaauucucaucacuauaucauggucggcaacgagacagggcuggagcucacccugacgaauaccagcaucauuaaccauaaauucugcaaucuuuccgacgcgcacaagaaaaaccuguacgaucaugcucucaugucuaucauuagcacauuucaccuguccaucccgaauuucaaccaguaugaagccaugagcugugacuuuaauggaggcaagauuucugugcaguacaaccugucccacagcuaugccggcgaugcugccaaucauugcgggaccaucgcuaacggaguucuccaaacauucaugcggauggccuggggcgggucuuacauugcgcuggacuccggacgcgauagaugggacuguaucaugaccagcuaccaguaucuuaucauucagaacacgacaugggaggaucacugccaguuuucucggcccuccccuaucggcuaccuggggcuccugagccaacgcaccagagacauuuauaucucccggcgccuucugggaacauucaccuggacccucucugauagcgaaggcaaggacacacccggcggguacugucugacgagauggaugcugauugaggccgagcucaaaugcuuuggaaauaccgcuguggccaaguguaacgaaaaacaugaugaggaguucugcgacaugcugcggcuuuuugauuucaauaagcaggcuauccagcgccugaaagccgaagcgcagauguccauccaacucauuaacaaggccgucaaugcucugaucaacgaccagcuuauuaugaagaaucaccugagagacaucaugggcauuccuuauugcaacuacagcaaauauugguaccucaaucacacaaccacagggaagaccucucugcccaaauguuggcugguguccaacggaagcuaccucaaugaaacgcauuucucugaugacaucgagcagcaagccgauaacaugaucacagagaugcugcagaaggaauauauggagcggcagggcaaaaccccucuugggcugguggaccucuuugucuucagcaccuccuuuuaccugauuucuaucuuccugcaccuuguuaagauuccgugaggacuaguuauaagacugacuagcccgaugggccucccaacgggcccuccuccccuccuugcaccgagauuaauaaaaaaaaaaaaaaaaaaaaaaaaaaaaaaaaaaaaaaaaaaaaaaaaaaaaaaaaaaaaaaaaaaaaaaaaaaaaaaaaaaaaaaaaaaaaaaaaaaaa

SEQ ID NO: 43296 - RNA, 1551 nt, Artificial Sequence
  mRNA product Design i-3 (A100) comprising derived and/or modified sequence from MOPV/LASV reassortant(IGS-1;Clade IV)__AFY05576__GPCmut13 (opt5)
aggagaaagcuuaccaugggccagaucgugaccuucuuucaagaggucccccacguuauugaagaggugaugaacaucgugcugauugcccucagcguccuggcugugcuuaaggggcuguacaauuucgccacaugcggacucguuggccuggugacguuucuucugcucugugggagauccugcaccacaucucuguauaaaggagucuacgaacugcagacccucgagcugaacauggaaacacuuaauaugaccaugccucugagcuguacaaagaacaauucccaucacuauaucauggugggcaacgagaccgggcucgagcugacgcuuaccaauacaucuauuaucaaccauaaauucugcaaucugagcgacgcgcacaagaaaaaccucuacgaucaugcucugauguccaucauuucuaccuuucaccugagcaucccgaauuucaaccaguaugaagccauguccugugacuuuaauggaggcaagauuagcguucaguacaaccucucucacuccuaugccggcgaugcugccaaucauugcgggacaguggcuaacggaguccugcaaaccuucaugcggauggccuggggcgggagcuacaucgcgcuugacucuggacgcggcaacugggauuguauuaugacguccuaccaguaucugaucauucagaauacaaccugggaggaccacugccaguuuagcagacccucuccuaucggguaccucggacugcuuucccaacggacacgcgauaucuauauuagcagacggcugcucggcaccuucaccuggacacuguccgacucugaaggcgaggauacgcccgggggauacugucugacccgcuggaugcucaucgaggccgaacugaagugcuuuggcaacacagcuguggccaaauguaaugagaagcaugacgaagaguucugcgauaugcuuagacuguuugacuucaacaaacaggcuauucagcggcucaaggccgaagcgcagaugagcauccaacugauuaauaaagccgugaacgcucuuaucaaugaucagcugaucaugaagaaccaccuccgcgacauuauggggaucccuuauugcaauuacuccaaguauugguaccugaaccacaccacaaccggaagaacgagccugcccaaauguuggcucgucucuaauggcuccuaccugaacgagacacauuucagcgacgauauugagcagcaagccgacaauaugaucaccgaaaugcuucagaaggaguauauggaacggcaggggaaaaccccucugggacucguugaucuguuuguguucucuaccagcuuuuaccugauuuccaucuuccuucaccucgugaagaucccgugaggacuaguuauaagacugacuagcccgaugggccucccaacgggcccuccuccccuccuugcaccgagauuaauaaaaaaaaaaaaaaaaaaaaaaaaaaaaaaaaaaaaaaaaaaaaaaaaaaaaaaaaaaaaaaaaaaaaaaaaaaaaaaaaaaaaaaaaaaaaaaaaaaaa

SEQ ID NO: 43297 - RNA, 1551 nt, Artificial Sequence
  mRNA product Design i-3 (A100) comprising derived and/or modified sequence from LASV(LM765-SLE-2012;Clade IV)__AIT17814__GPCmut13 (opt5)
aggagaaagcuuaccaugggccagaucgugaccuucuuucaagaggucccccacguuauugaagaggugaugaacaucgugcugauugcccucagcauccuggcuguccuuaaggggcuguacaauuucgccacaugcggacucgugggccugguuacguuucuucugcucugugggagauccugcaccacaucucuguauaaaggaguguacgaacugcagacccucgagcugaacauggaaacacuuaauaugaccaugccucugagcuguacaaagaacaauucccaucacuauauuauggucggcaacgagaccgggcucgagcugacgcuuaccaauacaucuaucaucgaccauaaauucugcaaccugagcgaugcgcaccggaagaaucucuacgaccaugcucugauguccauuaucucuaccuuucaccugagcauuccgaacuucaaucaguaugaagccauguccugugauuuuaacggaggcaaaaucagcgugcaguacaaucucucucacuccuaugccaaggacgcugccgaucauugcggcacaguugcuaacggggugcugcaaaccuucaugcgcauggccuggggaggcagcuacauugcgcuugacucugggagaggacggugggauuguaucaugacguccuaccaguaucugauuauccagaauacaaccugggaggaccacugccaguuuagccgccccucuccuaucggcuaccucgggcugcuuucccaaagaacacgggauauuuauaucagccgcagacugcucggaaccuucaccuggacacuguccgacucugaaggcaaggauacgcccggcggguacugucugacccgguggaugcucauugaggccgagcugaaaugcuuuggaaacacagcugucgccaaguguaacgaaaaacaugacgaggaguucugcgauaugcuucgccuguuugacuucaauaagcaggcuauccagagacucaaagccgaagcgcagaugagcauucaacugaucaacaaggccgugaaugcucuuaucaacgaccagcugauuaugaagaaucaccuccgggauaucaugggcauuccuuauugcaacuacuccaaauauugguaccugaaucacaccacaaccgggaagacgagccugcccaaauguuggcucgugucuaacggauccuaccugaaugaaacacauuucagcgacgauaucgagcagcaagccgacaacaugauuaccgagaugcuucagaaggaauauauggagcgccagggcaaaaccccucuggggcucgucgaucuguuuguuuucucuaccagcuuuuaccugaucuccaucuuccuucaccucgugaagauuccgugaggacuaguuauaagacugacuagcccgaugggccucccaacgggcccuccuccccuccuugcaccgagauuaauaaaaaaaaaaaaaaaaaaaaaaaaaaaaaaaaaaaaaaaaaaaaaaaaaaaaaaaaaaaaaaaaaaaaaaaaaaaaaaaaaaaaaaaaaaaaaaaaaaaa

SEQ ID NO: 43298 - RNA, 1551 nt, Artificial Sequence
  mRNA product Design i-3 (A100) comprising derived and/or modified sequence from LASV(LM776-SLE-2012;Clade IV)__AIT17824__GPCmut13 (opt5)
aggagaaagcuuaccaugggccagaucgugaccuucuuucaagaggucccccacguuauugaagaggugaugaacaucgugcugauugcccucagcauccuggcuguccuuaaggggcuguacaauuucgccacaugcggacucgugggccugguuacguuucuucugcucugugggagauccugcaccacaucuguguauaaaggagucuacgaacugcagacccuggagcucaacauggaaacacugaauaugaccaugccucuuagcuguacaaagaacaauucccaucacuauauuauggugggcaacgagaccgggcuggagcucacgcugaccaauacaucuaucaucaaccauaaauucugcaaucuuagcgacgcgcacaagaaaaaccuguacgaucaugcucucauguccauuaucucuaccuuucaccugagcauuccgaauuucaaccaguaugaagccauguccugugacuuuaauggaggcaagaucagcguucaguacaaccugucucacuccuaugccggcgaugcugccaaucauugcgggacaguggcuaacggaguccuccaaaccuucaugcggauggccuggggcgggagcuacauugcgcuggacucuggacacggcaagugggauuguaucaugacguccuaccaguaucuuauuauccagaacacaaccugggaggaccauugccaguuuagccgccccucuccuaucggguaccugggacuccugucccaaagaacacgggauauuuauaucagccgcagacuucugggcaccuucaccuggacacucuccgacucugaaggcaaagauacgcccgggggauacugucugacccgguggaugcugauugaggccgagcucaagugcuuuggcaauacagcuguggccaaauguaacgaaaagcacgacgaggaguucugcgauaugcugcgccuuuuugacuucaauaaacaggcuauccagagacugaaggccgaagcgcagaugagcauucaacucaucaacaaggccgugaaugcucugaucaacgaucagcuuauuaugaaaaaucaucugcgggacaucauggggauuccuuauugcaacuacuccaaguauugguaccucaaucacaccacaaccggaaaaacgagccugcccaaguguuggcuggucucuaacggcuccuaccucaaugaaacacacuucagcgacgauaucgagcagcaagccgacaacaugauuaccgagaugcugcagaaagaauauauggagcgccaggggaagaccccucuuggacugguugaucucuuuguguucucuaccagcuuuuaccugaucuccaucuuccugcaucuugugaaaauuccgugaggacuaguuauaagacugacuagcccgaugggccucccaacgggcccuccuccccuccuugcaccgagauuaauaaaaaaaaaaaaaaaaaaaaaaaaaaaaaaaaaaaaaaaaaaaaaaaaaaaaaaaaaaaaaaaaaaaaaaaaaaaaaaaaaaaaaaaaaaaaaaaaaaaa

SEQ ID NO: 43299 - RNA, 1551 nt, Artificial Sequence
  mRNA product Design i-3 (A100) comprising derived and/or modified sequence from LASV(Mad39;Clade IV)__ANH09722__GPCmut13 (opt5)
aggagaaagcuuaccaugggccagaucgugaccuucuuucaagaggucccccacguuauugaagaggugaugaacaucgugcugauugcccucagcauccuggcuguccuuaaggggcuguacaauguggccacaugcggacucauuggccugguuacguuccuucugcucugugggagauccugcaccacaacccuguauaaaggaguguacgaacugcaggcgcucgagcugaacauggaaacacuuaauaugaccaugccucugucuuguacaaagaacaauagccaucacuauauccgggucggcaacgagaccgggcucgagcugacgcuuaccaauacaucccugaucaaccauaaauuuugcaaucucucugacgcucacaagaaaaaccuguacgaucaugcccugaugagcauuaucuccaccuuccaccucucuauuccgaauuuuaaccaguaugaagccaugagcugugacuucaaugauggaaagaucuccgugcaguacaaccugagccacacauaugcuggcgacaccgccaaucauugcggcacgguugcuaacggggugcuucaaacauuuaugcgcauggccuggggaggcucuuacauugcgcuggauuccgggagaggaggcugggacuguaucaugaccagcuaccaguaucucauuauccagaacacaaccugggaggaucacugccaguucucucggcccuccccuaucggguaccugggacuucugagccaacgcaccagagacauuuauaucucucggcgccuccugggcacauuuacguggacccuguccgauagcgaaggcaaggacacacccgggggauacugucucaccagauggaugcugauugaggccgagcuuaaaugcuucggcaauacagcugucgccaaguguaacgaaaaacaugaugaggaauuuugcgacaugcugcgccucuucgauuuuaauaagcaggcuauccagcggcugaaagccgaggcgcagauguccauucaacuuaucaacaaggccgugaaugcucugaucaacgaccagcucauuaugaagaaucaccugagagacaucauggggauuccuuauugcaacuacucuaaauauugguaccugaaucacaccgugacgggaaagacaagccuccccaaauguuggcuggucuccaacggcagcuaccuuaaugaaacccauuucucugaugacaucgagcagcaagccgauaacaugauuaccgagaugcugcagaaggaauauauggagcggcaggggaaaacaccucucggacugguugaccuguucguguuuuccaccagcuucuaccuuaucucuaucuuucuccaccuggugaagauuccgugaggacuaguuauaagacugacuagcccgaugggccucccaacgggcccuccuccccuccuugcaccgagauuaauaaaaaaaaaaaaaaaaaaaaaaaaaaaaaaaaaaaaaaaaaaaaaaaaaaaaaaaaaaaaaaaaaaaaaaaaaaaaaaaaaaaaaaaaaaaaaaaaaaaa

SEQ ID NO: 43300 - RNA, 1551 nt, Artificial Sequence
  mRNA product Design i-3 (A100) comprising derived and/or modified sequence from LASV(Z0947-SLE-2011;Clade IV)__AIT17840__GPCmut13 (opt5)
aggagaaagcuuaccaugggccagaucgugaccuucuuucaagaggucccccacguuauugaagaggugaugaacaucgugcugauugcccucagcauccuggcuguccuuaaggggcuguacaauuucgccacaugcggacucgugggccugguuacguuucuucugcucugugggagauccugcaccauuucucuguauaaaggaguguacgaacugcagacacucgagcugaacauggaaacccuuaauaugacaaugccucugagcuguaccaagaacaauucccaucacuauaucauggucggcaacgagacagggcucgagcugacccuuacgaauaccucuaucauuaaccauaaauucugcaaucugagcgacgcgcacaagaaaaaccucuacgaucaugcucugauguccaucauuucuacauuucaccugagcaucccgaauuucaaccaguaugaagccauguccugugacuuuaauggaggcaagauuagcgugcaguacaaccucucucacuccuaugccggcgaugcugccaaucauugcgggaccguugcuaacggagugcugcaaacauucaugcggauggccuggggcgggagcuacaucgcgcuugacucuggacgcgauagaugggacuguauuaugaccuccuaccaguaucugaucauccagaacacgacaugggaggaucacugccaguuuagccggcccucuccuauuggcuaccucgggcugcuuucccaacgcaccagagacaucuauauuagccggcgccugcucggaacauucaccuggacccuguccgauucugaaggcaaggacacacccggcggguacugucugacgagauggaugcucaucgaggccgagcugaaaugcuuuggaaauaccgcugucgccaaguguaacgaaaaacaugaugaggaguucugcgacaugcuucggcuguuugauuucaauaagcaggcuauucagcgccucaaagccgaagcgcagaugagcauccaacugaucaacaaggccgugaaugcucuuauuaacgaccagcugaucaugaagaaucaccucagagacauuaugggcaucccuuauugcaacuacuccaaauauugguaccugaaucacacaaccacagggaagaccagccugcccaaauguuggcucgugucuaacggauccuaccugaaugaaacgcauuucagcgaugacauugagcagcaagccgauaacaugaucacagagaugcuucagaaggaauauauggagcggcagggcaaaaccccucuggggcucgucgaccuguuuguuuucucuaccagcuuuuaccugaucuccauuuuccuucaccucgugaagaucccgugaggacuaguuauaagacugacuagcccgaugggccucccaacgggcccuccuccccuccuugcaccgagauuaauaaaaaaaaaaaaaaaaaaaaaaaaaaaaaaaaaaaaaaaaaaaaaaaaaaaaaaaaaaaaaaaaaaaaaaaaaaaaaaaaaaaaaaaaaaaaaaaaaaaa
